United States Patent Application Publication US 2020/0377945 A1 - sequence listing, part 59

SEQ ID NO: 13232 - DNA, 16245 bp, Unknown
  gut microbiota DNA sequence
aaattctggattataatcgcatagtcaaagatttaaatggaatgactgaagaagaatttttagtaaaaatgcaggaactgtttgatgtatctgagttgaatgagacagataaacatccacaggagaaaggtaccttttccatgtatctgaaaggacagtggtatacctgtaagattcgtccggaagatttgaattcggatccggtgaaaggactggatgtttctcttcttcaggatttactgttgcagccggttctcggaattacagatccaaagacagatccacgcattgattttgtgggtggtatcaggggaacaaaagaattggaaaaacgttgtcgtgaagatgcaaaggtggcttttgccatgtatccgacttccatcggagaacttttttctgttgcggatgcaggtcttctgatgccgccaaaatccacctggtttgaaccaaaactgagaagtggactctttattcatttgctcaatgagtaaaaagaaaaggtaagctatctttcaaaaacagatgaaacatagtttgccggtgggagataaaaaataattctgtgtgcgttgggttcaaaatacaaatggagactcaacgtatacagaacacaagaatggagttatagaatgctgaagtttttattaacacaaaatctggcagatgaagtgactgatgttgtatcggataatgtgaatttctggtcctggaatacaattgtcaaatattttgaagattcatttccaactgtgttagattttcttgtaaaactgattattgcgattatcgtactgctggttggacgcaaaattatacagctggttcgaaaatttgtccgaaaatttctgaacaaaacaaactgggatgaaggtgtaaagcagttccttgataatatctgctatgtaggactgcactttgtcctgattatgatcgtacttggaaagtttggaatcactgcaagttcggtcattgcagttatcggttctgtcggtctgtccgttggcctggcgttgcagggaacattatccaattttgcaggtggagttttgatcctgattttaaaaccatttaaagtgggagattacatccgggaagatactcacggaaacgaaggaactgtttcagagatccagctctgttatacgaaactgctgaccgtagataataaaacggttgtcctgccaaacggcagcttatcaaattccagtctgaccaacctgacacagcaggacaaacgaaggattgacattacagttggcatttcctacgatgcggatatccggctggcaaaacaggtgatttccgatgtgctggagaaagagaaaaactgcatgaccagcgcggaaccatatcatgtgtttgtggacagtctgggagacagtgctgtggtcatcggcattcgtgtctgggtaaagaccgaggattactgggagaccagatggcgcatcacggaaaatgtgaaatatgctctggatgaccatcagattgagattccatttccgcaggtttctgtgtcaatgaagtcataaaaatcatgaaaaaggtgtttctgtgacagaaacagacggaaaatgaataaaatgtgacacaaaattgcaaaatggaagcagattcctgtggaaaaaatctttgagatatgatattgttaatggcagtgtatttctggcacgggcagttatccatgaaacaaatggtaaactttccgggtaaaaagtatcaataacaatattatgtatctgaaagggaaaatgaaatatgaataaacaaaagaaaaaactgccactggcgatgcagatttttattgcattgatcctggcaatcgtggtaggactgctgattcagagtcatgcaacatttgcggaaaattatattaaaccatttggaacgattttcctcaatttattaaaatttattgtagttcctattgtattattttccattatgtgtggaatcatatctatgagggatatcaaaaaagtcggagcaatcggtctgaaaacggttgtatattatatgtgtacgacagcatttgccattacgatcggtctgattggcggtaatgtcttccagcgttttttcccggtgatcgcaacgacagatctggcttatgaaatgccggaaaaaatgtctgtcatggataccattgtaaatattttcccgtcaaacttcatcagcccgatggtagagtccaatatgctgcaggtaattgtgatagcattattactcggtttttctattattggactgggagaaaaaaatgtcgggattgtgaaggcatgtaacagcctgaatgaagtatttatgaaatgtatggatatgattctgaaattatctccgatcggtgtattttgtctgctctgcccggtagtggcgagtaatggaactgcaatcattggttcactggccatggtattgctggcagcttacatctgttatgttctgcatgcaacgattgtatattccattgctgtaaagacaatgggcggcatcagcccgacccggtttttcaaggaaatgcttccagccattatgtttgcgttttccagtgcatcttctgtgggaacacttccaattaatatggagtgtgtggaaaaactcggtgccagaaaagaggtttcatcctttgtacttccacttggtgcaaccatcaatatggatggaacagcgatttatcagggagtctgtgcgatttttatcgcatcctgctatggtatacatctgactttgccacagatgatgaccattatcctgactgctacactggcatccattggtaccgccggtgtgccgggatctggaatggttatgcttgcaatggtgctgacttctgtaggacttccggtggatggaatcgctctggttgcaggtgtggatcgtatctttgacatgggacgtaccacagtcaatattaccggtgatgcaagctgctgtatcattgtgtccaatctggagcgcaaaaaagaagagcgcagggcaaaaagaggttcctgctgataggatatgctgtgaatcatgacaaaaagatgcagtaaaattgcaaaatttctgcattttcttgacaaaaaagttgaattgtgatacgtttagcttgtcaattttgcacagaatgtgcgcatgttttaggaggaagtattttatgcaacagggaactgtaaaatggtttaatgcaaaaaagggttatggatttatttcagatgcagaaggaaaagatattttcgttcatttttctgcactgaacatggatggattcaaagagctgaaagatggggaagctgttgaattcgaagtgattgaaggagataaaggaccacaggctgcgaatgtaacacgccttggttaatttataatataatgagtgcaaacgagtcaacgcgctcgcatgattgacgaatggcgaatgcccgtcagtccggaaaatctgtgatttttcggacgtgcactgcggacggatgtgttcatgatataatgcaaatgacccaaaggggctgtctgactggacagcctctttacttttgtccgaaagtgtgtaagaatagatgatactggaaaaactaagagaagatatagttttataaaaatcagagaactgcagggagtatgttttatggcagaatctgtgaaaaataaaagagtgtctgcttggtgcagaagaaattggaggaattatagttgaaaccagaattaagtcagttaaatgcgtacgagatcagggaggagaaacgactggatgatattcattcagatggtatgttgcttgtgcataaaaaaagcggtgcacgtatctgtgtgatgtcaaatgaagatgccaataaagtgttttatattgcatttcgtactccgccgaaagacagtaccggagtcccgcatattatagaacatactgtgttgtgcggaagtaaaaaatttccggtaaaggatccgtttattgaattagtgaaaggttctctgaatacatttttgaatgcaatgacctatccggataagacaatctatccggttgcaagctgcaatgacaaagattttcaaaatttaatggatgtctatctggacagtgtattttcaccgaatatttacagagaacagaatattttccgtcaggaaggctggcactatgaattaaagaatccggaagatgaactgacattaaatggtgtggtttacaatgagatgaaaggtgcgttttcttctgcagatggggtattagaccgtgaaattttacgctctctgtttccggatacaccatacagcaacgaatccggtggtgatccacaggtgattccggagctgacatatgaagaatacttgaatttccatcgtcagtactatcatccgtctaattcatacatctatctgtacggtgatatggatgtggttgaaaaattaaattggctggatcaggagtatctgagccattatgataaaatcgaggttgattcttcgataccggagcagaaaccttttgatgcaccgaaagaacatgaaattccatattctatttccagcacggacagtacagaaaataatacttatctgtcctgcaactgggctgttggaacgaatttagacagagaactctatattgccttcgatattctggactatgcattgctgagtacacagggtgcaccggtgaaacaggcgcttctggatgctggaattggaactgatatttatggcggctatgacagcagcagttatcagccaattttttccattgtagcaaaacatgccaatgcatctgatcagaaacgttttgaacaggtaattcgtgatgtgctgcaggagcaggtgaaaaacggtatcaataaaaagacattgctggctgcgatcaatggttcggagtttaaattccgtgaagcagatttcggacgcttcccgaagggactgatgtttggccttcaggtgatggacagctggctgtatgatgaaaatgcgccgttccttcatatggaggaactgggtgtgtatgactacctgagaaaacagctggatacggattattttgaacagctgattcagaaatatctgctggataatacgcatgtttcttatgtccagattgttccggaagtcggactgaccggaaaaagggagcaggctttaaaagaaaaattacaggcttataaagcaactttaagtaaagaagaaattgatcagctggtagaagagacacatgcactggaaaaatatgaggaagagccttctgcaaaagaagatctcgaaaaaatcccgttgctttcccgtgaagatctgaaagcaaccagtgaaccttataaaaatgaaaaagagatcattacaggggttccttatctgtggcatgattatcagacaaatggtattgtatatctcgacttgttatttgatgcgcaccacatttccgaggatctgattccatatcttggaattttaaaagtactgatgggaaaattaaatacaacagattacacatatacagattttgcggatgaagtaaatctgtataccggtggtgtttccaacgaggtgaatgtaacaggagacgtggctcatacagatcgctatcaggtgaaatacgaagtacgtctgaaagtattagaggcaaatcttgcacgtggcatggaattgattaagagcatgatgcttacaacggaatttacagatgaaaaacgtatttatgaagtgcttgcacaggcaaaatcaagacttcgtaatgaactcagcgaaagtggtcatgtgatttccgcgacaagagcgttatcctattattcaaaacgtgcgaaatatgcagacagtattcagggcattggattttacgaaattctggatcaggttgtttccaattatgagacagaaaaaaataagctgatggaaaaattacaggaagtttgcagcttgctcttccagagacagaatctgcttgtaagtgtgactggcggaagagaaggatatgcggcattgagaaatatgtcagatcagattacagacggactgtatgctgacacggaaaaagaatcgatagaaatttctctgccagatcagaaaaatgaaggatttaaggatgcttcccagattcagtatgtttctctggcaggtaactatgcgcagagtggtttctcttatcacggcgctatgcgtgtgttcaaggttattatgaattatgagtatctgtggcagaatattcgtgtgaaaggtggtgcatatggatgcagcacaaacgtaggaagaaatggagatgtctgcttcctgtcgtatcgtgatccgaatcttgaacggactttagaggtatatcgcggcgtgacagattatctgaaagagtttgaacttgatgagcgcgggatgacgcgttttgtgattggggctttcagtgaactggatgcaccactgactccgatgagccagggaagaagatctctgctttcctacctgactggtgtgtcatatgagatgattcagaaagaacgagaacaggcacttcatacctgtctgcaggatatcagaaatctggcagaaaccatgcaggctgtactggatcatagttatatctgtgcgattggaaacgaaggaaagctacaggaagaagcagacctgtttgatgtattaaagacattataaagaacgaatgatgacagttcagaattcagctgcatgcgatttggctttgtactgtatgcaactgaattcgatatgagaaggagaaaattgtatgaatgcaaattttaaatcaggatttgtaacattgattggcagaccgaatgtgggaaaatctactttgatgaatcagctgatcggtcagaagattgccattacatccaagaaaccacagacaacaagaaatcgaatccagactgtgtatacagatccggaccgtggccagattgttttcctggatactcctggaattcataaggcaaaaaataagctgggtgaatatatggttacagtagcggaacgtactttacaggatgtggatgttattgtctggctggtagaaccaagtacatttatcggtgcaggagaacagcatatagcagagcaactgcgcaaatctaatttgccggtcattttggttattaataaaacagatacggtcaaaaaagaagaagtattactgtttattgatgcgtatcgcaaaatcctggattttgccgagattattccggcatctgcactacacggagacaatacggatacgatcattgatatgatttttaaatatttaccatatggaccgatgttctatgatgaggataccgtaacagatcagccggagcgtcagattgtggcggagattgttcgtgagaaggcgttacatgcactggatgaagaaatcccacacggaattgctgttaccattgaatctatgaagcagagaaagaatggaatgacagatatcgaggctacgattatctgtgagcgtgattcacataagggtattatcatcggaaaaggtggagctatgctgaaaaaaatcggaagtaatgcccggtttgaaattgaaaaaatgctggaatgcaaagtcaatttgcgtctttgggtcaaggttcgtaagggctggcgtgacagtgatgttcagatgaaaaattttggatataatattaatgaataattgacctgtgattgcatacgctaacaatatctgaaggattgggaggagtatgcaatggaagataaaaaatggctgagctttgaaaaaaccggacgggttacagattatttaacgtattgccagagcagtattggcaaatatgcggaatatgaaacagacagccagggaagatgtggaaatatatatggggcagacgtacattctgacaggaataattctgaatacgatgccagtgggagaatacgataaaagaatcacgattttaacccgggaacgggggaaaattactgcttttgccagaggagcaagaagaccgaaaagttctttgcaggcagcgacgaacctgttttgttttggcagtttcgaggcatatgagggacgcagttcttatacggtagtaaaagcagaaatcagtaattatttcagagaactggcgacggatctggacaagacatactatggctgttattttctggaactggcagattatttctgccaggaaaacagcgactgtgtgaatcagttgaaactggtctaccagacactgcgtgcactgaatgtgccttccctttctccgaaactggtgcgtgtgatttatgaattaaagacgttggtatattttggagtatatccaaacgtatttgcatgtactgcctgtgggagcagggaaaatctctggtgctttgatgagaagagcaatggtgttatgtgcagggactgccagcctggaccggcaaagtatccgttagatgatgcggcattatacacgatgcagtacatagtgacggctcctgtcgaaaaattgtatacttttacagtaactgaggaagtattcggtcaggtgagaaagctgattcagtattatataaaccagtatgtagaaaaagaattaaagacagttgcttttttaacataggaatacttgcaatcagaaacggaaaccgttataatttagaaattgatgtgaatgcagacagcatacgtcaatttctgaattattttgcagatattgcagaaacagtatgtctgtgataaaaacttcgggcagactggatttggaggatgagatatgagaaaaagaatggtggcgcttagctgctgtatcggtatgtgcatgctgatggctgcgtgtggaacgaaactggatgtgcaggagaatacgatcgcattgcagcggaatggcaagattctggaggctgccgtggaaacctttgatcagtcctattataaggaagatgaactgaatagctacatacagaatgccgtggatgattatacggcagaacacgggaaaaagtcggtgtctgtgacggagtcaaaggtagaggagaaaaaagcatatcttacgcttcaatatgaaaatgcagagacctttcaggatttttcaggtattgaatgtttttccggaagtattgtggaagcacagtcggcaggttatgattttgaacaggatttttatccggtgacagatggcaaagcggataagaagacagttagaggatcttcactgttggaggatgatgatctgaaagttctgattgtaaaagagaattctgatctgatcgtcccgggaaaaatagcatatgtttctacagagggcacagaagtgacatctgaaaaacaggtgaatgtcacacagaaacagcaggatacagatgaatccgtgttggtatatgtactgtatcggtaatgatatctgcagatgtacaggaacttgataaattagggtttgcgaaatggcagagacgtttggcacctaaaaataaatggaagaaagaggacatatcatggaaaagacaatggaaaaaattgtagcactggcaaaatccagaggattcgtatatccgggatctgagatttacggtggacttgcaaatacatgggattatggaaatcttggtgtggaattgaaaaataatgtaaaaagagcatggtggcagaaattcattcaggaaagcccgtacaatgtaggtgttgactgtgcgattctgatgaatccacagacatgggtagcttccggacatcttggcggattttctgatcctctgatggactgcaaagagtgccatgagcgtttccgcgcagacaagatcattgaggattttgcagcagagaataatattgagttaaaaggctctgtagatggctggacacaggaagagatgaaagcatttatcgctgacaataacgttccgtgcccgacctgtggaaaacacaatttcacagatatccgtcagttcaacctgatgttcaagactttccagggtgtcacagaggatgcaaaaaataccgtatatcttcgtccggagaccgcacagggtatttttgtaaactttaaaaatgtacagcgtacatccagaaagaaaattccatttggtatcggacagatcggtaaatccttccgtaacgagatcacaccgggtaactttaccttccgtaccagagagttcgagcagatggagcttgagttcttctgcgagccggatactgatctggagtggtttgagtactggagaaacttctgtatcaactggctgaaatctcttggcatgaaagaagaagagatgcgtgtccgtgaccatgaccaggaagagttatctttctatagtaaagcaaccagtgatatcgagttcttattcccgtttggctggggtgaactctggggtatcgcagaccgtacagattacgatctgacacagcatcagaatacatccggacaggacctgacctatttcgatgaccagaaaaacaaaaaatacattccatatgttatcgagccatctctgggtgcagaccgtgtggtacttgcattcctgtgcggtgcatatgatgaggagaatatcggaacagaggagaaaccggatgtaagaactgtccttcatttccatccggcactggctccggttaagatcggtgtccttccgttatctaaaaaattaaatgagggcgcagagaaagtatttgagcagctttgcaaaaaatacaactgtgagtttgatgacagaggaaatattggtaaacgttatcgtcgtcaggatgagatcggtacaccattctgtgtaacatacgattttgattccgaagaagatcatgcagttactgtccgcgaccgtgacactatggagcaggttcgtattccgattgctgagctggatgcatatttcgcagacaaatttacattctagtgaaaaacatttaaataagaaaaagaatttgtaaaaatcttttgattcagatcccattgctgatccgtgcgatccgcaatgggatttttcatctcagtctgagatgagactcccacttctgcaagtggtgagtagtaacaagtatttctcagtgggagttcgatctccgactgagataaatgctccgcgagggcgcacattgtctgggagacaatggttttgcgccgaccggaacggagtgtagagtgcagtgattctgaaaagaagatgtcagcttgcgctgaccagaatcacgcaccaagtctcacgtgcgttcgacttgaactgatcatgttttttgaattttctataaaacaggtaaaatatatcatatacgatagtcgaaaataagcgaaaaatgagcggatagtgaccaacttgtggggtagtgaaaaaaaggtaagtgtttcgttagaaatttcacaaaaaaggttgaaatctgcaaaatttgtggtaaaatatagacgaagtttcggggaaaacacgaaacgaaatgtgaaaaattgctaaaaacagcagaactttatctgcttgcaaaacacaatgtatattttaggaggaattagaaatggcaaaatgggtgtacttatttagcgaaggtaacgccagcatgcgcgaacttcttggaggtaaaggtgcaaaccttgctgagatgacaggtcttggacttccggtaccacagggcttcactattactacagaggcttgtacacagtactacgaggatggccgtgaaattaacgatgagattcagggacagatcaacgagtacattggtaagatggaagaaattactggtaaaaaattcggtgacaaggagaatccattgctcgtatcagttcgttctggtgcaagagcttctatgccgggtatgatggatacaatcttaaaccttggtctgaatgagacagtagttgaggtattagcagagaaatccggaaatccgcgttgggcatgggattgctatcgtagatttattcagatgtattccgacgttgttatggaagtcggcaaaaaatatttcgagcagctcatcgatgagatgaaagagaaaaaaggcgttacttatgacgtagagcttacagcagaagacttaaaagaacttgctggacagttcaaagctgagtacaaagctaaaatcggacaggacttcccggatgatccgaaggagcagttaatgggagctgttaaagcagtattccgttcttgggataacccacgtgcaaacgtttaccgtcgtgacaacgatatcccgtatagctggggtacagctgtaaacgtacaggctatggcatttggtaacatgggtgatgactgtggtacaggtgttgcatttactcgtgacccggctacaggcgagaagaaactgatgggtgagttcctgatcaatgcacagggcgaggacgtagttgctggtgttcgtacaccgatgccaatcgctaagatggaagaggaattcccggaagcatatgctcagttcgttcaggtttgcaaaactctggaagatcactacagagatatgcaggatatggagtttactgttgaaaacagaaaactttacatgttacagacacgtaatggtaagagaacagctcaggctgcattaaagatcgcttgtgatctggtagatgaaggaatgagaacagagaaagaggctgtagctatgatcgagccacgtaaccttgacgctctgcttcacccgacattcgatacagcagcattaaaagctgctacaccaatcgcaaaagcacttggcgctgctcctggagctgcttgtggtaaaatcgtatttacagcagatgacgctgtagaatgggctgagagaggagagaaagttgttctggttcgtcttgagacatctccggaagatatcacaggtatgaaagcttctcagggtatcctgacagttcgtggtggtatgacatctcatgcagcagtagttgcccgtggtatgggtgcttgctgtgtatccggatgtggcgatatcattatggatgaagaaaacaagaaatttacacttgcaggaaaagagtatcatgaaggtgatgtaatctcctttgatggttctacaggtaatatttatgacggagcaatcccgacagttgaagctactatcgccggcgagttcggaagaatcatggcttgggctgacaaatatagaaaattaaaagttcgtacaaatgctgatacaccggcagatgctaaaaaagctcgtgagcttggtgcagaaggtatcggactttgccgtacagagcatatgttcttcgaaggcgacagaattgacgctttccgtgagatgatctgtgcagatacagtagaagagagagaagtagctcttgagaaaatcttaccgtatcagcagggtgacttcgagcagttatacgaggcaatggaaggcgaagcagttacaattcgtttccttgatccgccacttcatgagttcgttccgacagaggaagaggacatcaagaaactggcagatgctcagggtaaatccgtagagcagatcaaagctatcattgaaggtctgaaagagttcaacccgatgatgggacatcgtggatgccgtcttgctgtaacatatccggaaatcgctaaaatgcagacaaaagcagttatccgtgcagcaatcaacgtatccaaagctcatccggattggaacatggtaccagagatcatgattccgttagtaggcgatatcaaagagttaaaatatgttaagaaatttgttacagagacagctgacgctgagatcgcagcagcaggtgttgatctgaaatacgaagttggtactatgatcgagatcccgcgtgcagcattaacagctgacgagatcgctacagaggctgagttcttctgcttcggtacaaacgacttaacacagatgacatttggtttctcccgtgatgatgcaggtaaattcctggatgcttactatgacgctaagatcttcgagaatgatccatttgcaaaactggatcaggatggcgttggtaaactgatggagatggcactgaaacttggtaaaccggttcgcccaacattacattgtggtatttgtggagagcacggcggagatccttcttccgtagagttctgccataagatcggacttgattacgtttcctgctcaccattccgtgtaccgatcgctcgtcttgcagcagcacaggcagcaatcgctgatgagaaataaaatttctagttgattcatatgactaaataatttataataggcatatcgcatggcgcggtatgcctattattttgaaaggaacaaaggaacagtggcaaagagtcagaaaacctatgggatagtcgtggactattttaagaaaaaaattatagcgggagatttaaaacctggagagaaacttccgccggagcgggagattgcggaggaactgggtgtcagccgtaattctgttcgggaagccattcgttttatggatatgacaggtgttatatcttcccagcagggatccggtaattatattacctgtgatttccagagcagtctggaggaaaccatgggcatgatgtttgccatggatcagattgattatatacagatcagccagattcgttattctctggagcgtctggcgtttacactggcgttggatcatgcttctgaggaagaaatccgactgatggaggagtacgtcaataagctggataagagtacggatgccagcgtgaacaatgaactagataagaaaattcactatacattggcaagagcttcgggaaatattttgattctggatattctggaagcgtgttccagtgtcattgacgaatttgtcaaagatctgcgtcgggagatcattcgaaaagaatctggaaaagaagcattaaatgcctgtcatcatcggattgtcaaagcactgcgggagcataatcgtgaagatggcattctggcactgaaggagcattttgccattattgatgagattctgttggaatggaagaatcaataagcagacagagaagaaaatgagtacaaagagaaaaccacagcttggaggagaacaagctgtggttttctttttgttttgaggaaaaatattgaatataaaagtaatatctcaatgttgttgaataaacggagtgacatctgtagtgcgcagtgcagtctccgcaacttcccatatctttgaatctacaccgtgagaggcataggaagggcgcagatgatcctgcatggctttgatacaggcgttcgtattgcgatcatttaatgcctgaaggatatccaggtgaccagcaagattacagaacgtagctccgttttcggaataatgctgaatctggatcagacgaccttttttggtaagctgttcctgaatgtcagtaaatacctgattgccggaaagctccactaaaacctgatgaaatttgaaatccagccggattcgttccataatatcatttcgatcagaggcacgctggcagtctgcagcaatgctcatcagatcctgtaagtctttgttacttgcgtttaatacgatcagcggtgcgacagtagtgtcgatcgcaaggcgaaccaaaccgatatcctctttctcctttgcggtaaatgtatggatccgggcaaatgtgccggtagagagatctaccagaccatcgccggcaaggcgtcggattgcttcgcgcaccggtgtgcggctgatttccagttcgttaataagctgctgttccaccagtcggtcgccagactggtacttcaatgaatatatcatatcaagcagtttttcataagctgtgtctgctaatgtctgtttcatatggttatacctatcccttatcttcaaccctaaagttgatactacgaagaacaaatactatatagaagaaacagaactgttttttctatagtaggataagttctatgttggtagttacatttttgataccactagtatataatttttgaaactgtttgtcaatctgtaaaactgtataccaaaataaagagaaaatggagatatgttaatggttgaaaaatctgataaatttgctttggatgtcaaaaaaagagaaaaataaagctaataatgcaaagtgcaaaaaagtaactgtaggaaattgtgcatattttataaagtaaataaatttaaataaaaataattggcacaaatgccccatagatgtatattgcaagcaggaagtatattatttccgaaatagtatacaattcaagaaaagaaataccagtaaaaacataatggtatacaatttatgaaaagaaataccgcggaagatagtaatggatacgatttatgaaaggagatgattgtttgtcagagtatatccttgaaatgaaagatatcagcaagggctttgcaggggttaaggctctggatcatgtacagttgcaggtgaaacccggtgaggtacatgccagtttacgaaaatatcagatgggagatg

SEQ ID NO: 13233 - DNA, 1360 bp, Unknown
  gut microbiota DNA sequence
actcccactgagaaagacttgttattactcaccacttgcagaagtgggagtcttctcgactgagataaaatattgattctcgcatccattgaaaaatacccataatattcttcctgtttctgcgattctccccattattttcaacaggatcattttttcacatttctaatttagtgtgcttcgaaccagtttttaccggactgcacatcgacttccagcgttaccgccaaatctgccgcatgacgcatttcctcggccagaagcgtttttacatattcctcttcgtccgctgctgcctcgatcagaagttcatcgtgcacctgcaggatcagcttagattttaactgttcccgatccagacgctgttttacccgaatcatggcaatcttgataatatccgctgcggttccctgaatcggagagttcatggcaatacgttcaccgaaggaacgctgcatgaagttgctggaggacagctccggaaccggtctgcgtctgccaaacatcgtctccgcatagcctttttccttcgcatcggtcaccagacggtcaaggaatgtcttgatacccggataggtctcaaaataacttgcgatatagccttccgcttcttttcgtgtgatactcagatcctggctcagtccaaaagaactgataccgtacacaataccgaagtttaccgcttttgcatttcttctctgaagatctgttacttcttctaacggcgtatggaatacctgagaagcggtgatcctgtgaatatcctccgcatgctgataagccgcgatcaggttctgatctccggacatatgcgccaacacacgtaactcaatctgggaataatccgcatcgataaatacataaccatccttcggcacaaatacttttcggatcagtctgccaagttccatacgaattggaatattctgcaagttcggctccgtactgctgatacgtccagttgctgtaatagtctggttaaaagtactgtgaatccttccatccggagcgatacacaatgccagtccatccgcatacgtggatttcaatttggtaagctgacggtactccagaatctctgatacgatcggataatccggtgccaaacgctccaatacatccgcagcggtggaatatccagttttcgttttcttaccgttcggcatctgcaatttttcaaacagaatgacaccaagctgtttcggagaattaatgttaaaagtctctcctgctttttcataaatggaagtctccagttccgcgatccttccggtaagctgtgcgccgtagctttccagctctgccttttctgcgcggacaccttccttttccatatctgccagcacaaataccagcggca

SEQ ID NO: 13234 - DNA, 22036 bp, Unknown
  gut microbiota DNA sequence
cagatgaagataaaaagagcgaatctatctgaagggaaggaacatttattcaaagaaaaatgaaacacaggaatcctgcgatctgcaggattccatttttaaggtgaggaagaaacatatgattttagcatgtcaaaatatcagtaaatcatttggtgtggaaccggtgatccgaaatgtgagttttcatgtggaagatcaggaaaaagtggcaattgtaggaattaacggtgccggaaaatccacactgttgaaaattatcgtaggggagctgccggcagatgaaggtaccgtaacccttgcaaaaggaaaaacgctggggtatctggcgcagcatcaggatatctccgatgagaggacgatctatgaggcagttctggaaggaaaacgtcagcttatcgatatggagcagaaaatccgtgagctggaagaaggaatgcagtccgtatcaaaagaggatatggaagcttatatggaaaattatcataagctgctgcatgagttcgaagccagagatggttattcttatcgcagcgaggtttccggtgtcttaaaaggtcttggattttccgaggatgattttgaaaaacactgcaacgagctgtccggtggacagaaaacccgtgtatctctggcgcgtctgctggcgacacatccggatatcattctgctggatgagccgacgaaccatttggatattgagtctattcagtggctggagacatttttgctgaattacaaaggggctgttgtgatcgttgcccatgaccgttattttctggatcgaatcgtaacgaaagttgtggaaatcagcatgcacaaatctgcagtgtacgatggtaattatacagcttatgctgcaaaagctgcttttgcaagagaggaagcgttgcgtgcttactataatcagcagcgggagatcaaacatcaggaagccgttattgaaaaactgaaatcctttaaccgggagaaatccatcaagcgtgcagagagccgtgaaaagcagctggcaaaaatagatgttttagaaaaaccacaggaagaaaaatccgagatgcatatgacactgacaccgtccattatcagtggaaacgatgtgctgcgggtggaaggtctttcaaaggcttatgaaaataagaaactgtttcaggatatttcttttgaaatcaaacgtggtgagcgcgtggctctgatcggtcagaacggaaccggaaagacaacgattttaaagatcctgaatgaaaaagtaaatgcagatgcaggttcttttacgttgggaacaaacgtaaaaatcggttattatgatcaggagcagcaggtgcttcatatggaaaaaacgctgatggaggagattgcggacgattatccgaagttgacacagacacgtatccgaaatattctggcagcatttttgtttaccgaggatgatgtgttcaagcgcgtcagtgacttgagcggtggtgagcgcggccgtctgtcactggcaaaactgatgctctccgaggcaaacttcctgattctggatgagccgacgaaccatttggatatcgcttctaaggaaattttggaatctgctctgaaacgttatgagggaaccgtgctgtttgtatcccatgatcgttattttattaaccggacagcgacccgtatcctgaacctgacagagcacagtctggtcaattatatcggtaattatgactattatctggagaaaaaagagacaaacgagcgggcatatctggcatcttcggagacagaagcagcagtaagcaccgaagaagtgtccgagggtaagacagactggcagactcagaaggaagaacaggcgaaaaagcgtaaaattcagaaccgtgtgaagaaaattgaagccgagattgagtctctggaagaaaaactgacagaattggatgaacaatttcaggatccggcagtggcgaccaactctgcaaaacttggaaaactgcacagcgagcaggtggaagtacaggaaaaactggatcagctgtacgaagaatgggaagaactggcatctgattgataaaaaattgacaaaataatctcagatgtttataatgaatacagataattgcgggtagtaacgcaaatggttgaaggagtaaatggaagatgcaaaaggaaatttcgcaggcggtcatacgtcgaatgccaagatattacagatatcttggagaattgctggatgcgggagtagaaagaatttcatccaatgagctgagcgttcgaatgaaagtaacagcttctcagattcgtcaggatctgaacaattttggtggttttggccagcagggatacggttataatgtgcagtatctgtatgaggagattggaaaaatccttggtcttgaccgacagcacaacattatcgtagtcggagccggtaatatgggacaggcgctggcaaattatgtgaagtttgagaaacgtggctttatgatcaccggactttttgatgtcaatccggcactggcaggtttgtcagtccgtggtattgagatacatatgatggacgaacttccggaatttgtaaagcatcagagagttgatattgcggtattgacacttccgaaagaaaaggcagaacaggcagcggagcagctggtaaaacttggcatccgtgcaatctggaactttgcacatctggatctggaacttccggatgatgtagttgtggaaaatgttcacttgtctgacagcttgatgcagctgtcttataacattgtccgcagacaggataacgaataagaaaccttgcaagcgtgcgctttgtcctacgggcagagcgcatttgtatgtaaattgtgcaaaacaaaccgggggaatataacgatgagagatgtattaaatggtcaggaaatgaaacagtgtgatgaaaataccatgaagatgggaatgttatcagcggtattaatggaacgtgctgccttaagtgtggtaaaagaaattatggagcgttatccggatgatgatacgagaattctgactgtatgcggcgcggggaataatggcggtgatggtatcgctgttggacgtctgcttgctttgcagggatatgaagtgggtatctgttttgccggaaatcctgaaaaaatgactacagaaacagcccggcagatgaagatcgcaaagaattataatgtgccggttttaacacccgaagaggcattccaggagaactgggatgtcattgtagatgcgctctttggcattggactgagccgggagataaccggaaaatatgcagatattataaaagaattgaacgtgtattacgagggcgccggtaaaattgcggtagatattgcttccggaatatcggcaaccaccggagaggtgcttggaacggcatttcaggcagatgtgactgtgacctttggatttgaaaagcggggacagcttttatatccgggagcagagtataccggcgcactcaaagtggaagatattggatttaccacagaaagtttgtttgacattataccgggattgcatgtgctggaaaaagaagatcttgatatgctgccaaaaagaacagcgcactccaataaaggaagttacggaaaactgttattgatcgccggttccgaaggaatggcaggtgcggcagtttttgcggcaaaggcggcataccggatgggatgcggtctggtccgggtggcaacggtggaaagtaaccgggcaattttgcagcaacttgtaccggaagcggtactggcagtttacaatgatacaacagatgtggtaaaatttgtggaaacacagcttgcctgggcagatgccgtggcagtcggttccggaatcggacagtctgcattgtcagaaaaaatggtgaaaactgtgatcgagcagaatacaaaaccgtgcctgtttgatgcggatgccctgaatctgatttccaaaaatccggaatggctgcagtttttgaaaaacggagcagtttatactccgcatcttggcgaaatgagccggctcatcggaacatctatcgcagaaatttcaaaagatcttgtgggggcagctttgcagtatgcacagaaaaatcacgtagtaatggtgttaaaagatgcaagaactgtgactgccacagaaaagcgtggctgtttcctgaatctgagtggaaatgacggaatggcaacagcaggatcaggagatgtgttaagcggtgtgatcggtgcattgctggcacagggcatgctgccggaagatgcggcacctatgggtgtatatcttcatggtctggcaggtgatgcggcagcaaagaaacttggcagacacagcatgatggcaagtaatatcgtagatggaattaccgatttgttgaaggaacaggaggacacaatagaacaatgaaagagtatcgcagaatatgcgcaaatatcagtttaaaagcattggagcataatttagatgcaatacatgactgtattgatcgtgatacgaagattattgcagtagtaaaggcagatggctatggtcatggggcagtaccgctggcagaagtgatggaacagcgcgaggatgtctggggctatgcggtggcaaccccggaggaagcggaagaactgtacagcaacggaatcaagaaaccgattctgatccttggttatacgttcccggaatacgatgagcagattgtaaaagaaggactccgcccggcagtattttctctggaacgggcaaagcagctgtcagaagaagcagttcgtcagaacaaagagtgtaagattcatattaaactggataccggtatgagcagaatcggttttcaggtgacggaacagtctgctgatgagattgcacagatcgcagcttcgccgaatattataatagaaggaatctttacacatttttccaaagcagatgagacggataaaactttcacaaagaaacaggcagatacttatgagcagatgatcacctggttaaaggatcgtcagattgagattccaattcatcatatttcaaacagtgcgggaattgtggatcttccggagtataataaggatattgtccgtgcaggaattattttatatggtctgtggccgtccgatgaagtagaaaaaaataatattgacttaaaaccgttactgtccttaaagagtcatgtagttcatgtaaaggaactggagccgggacggatcatcagttatggcggtacatttgaagtggaaaaaccgatgcagattgcaacggtaccggttggttatgcagacggttatccgcgcagcctgtcaaacaaaggatatgtgttgattcatggaaaacgtgcggcaatctgcggcagagtctgcatggatcagatgatggtagatgtttctgaaattccggatgtaaaaccgggagatgaggtgacattgatcggaacagatggtacagagacgatcacgatggaggagcttggcgatatgtctggaagatttaactatgagcttgcctgtgatctgaacaagcgaatcccgcgtatttactactaaaggtctgggtttatctcagtcgagaagactcccacttctgcaagtggtgagtaataacaagtctttctcagtgggagtacaatctccgactgagataaacgctccgcgggggcgcacattgtctgggagacaatggttttgcgccgaccggaacgaagtgtagatgtgcagtgattctgagaagaatatgtcagctttcgctgaccagaatcacgcaccaagtctcacgtgcgttcgacttgaatctggaacggtgattgatctgcaaaatatttttcagaattacagtatttttattgtaagcacttgtaaaagtggaagctgcttcttggtttgatataaaaataacaggaatacacacgctgaaaatgggaagaatgtcagtaaccttaaaaaatggagtgtatgaaatgttaattcgacgaggagatatttattatgcagatttacgaccggtggtcggttcggaacagggcggggtacgaccggttctgatcatccagaatgatgtcgggaaccgccacagtccaacggtgatctgtgcggcgatcacatcacggatgaataaggcaaaattgccgacacacattgaactaaatgctgccagatatcatatggtgaaggattccgtaattttactggaacaattacgaaccattgataaaacgcggttgaaagaccgtatctgtcatctggacagtgacattatgaagaaagtcggaagagcattacagatcagtctggatctttaggttacataatcttgacggatcataagacagatgctattctgaaaaaagtacacaacgattttggaaggagtatgagttgatggaggatgatggcagtccgttaaataattttggcaaaggactgaaaaaactgtttggaaaaagccgcagaggaagcggagaggatctgacagaacaggaaatcatgtctatggtaaatgaggggcatgagcatggtgtgcttcaggagagcgaagcggaaatgatcaacaacatttttacgctggatcagaaagaagcaaaagatattatgattcaccggaaacagatcatggcactggatggacaggagacgctgcaggaggcgctggtgcagatccgtgacatggcgtattcacgttatccggtttatctggatgatattgacaacattgtcggtatcatacatatcaaagacattttaaatcagatgcaggaaccgtcagtgctggaaaaacagcttaccaccattgataacctcatccgtccggctccgtttatcccggaaacacggaatattgatgtgctgttcaaaaatatgcagtcccagaagatccatatggtgatcgtggtagacgagtatggtcagacggcaggtctggtgaccatggaagatattctggaagagatcgtcggcaatatttttgatgagcatgataccgtggaagagcagatcgtagaggaatccgatggaagttatcttgtggatggcatgacggattttgatgaggtctgtgaactgttagagattccacaggaagaaacggaagattttgatacattgagcggattcctggtttcaaggattaataagatcccgaatgacggggaagtattccgggtggaagcctttggatttgagtttgacgttttgctggtggaaaataaagtcatccgtacggtgcgggtgaaaaaactggagcaggaagaagcaaaagagtaacatcaggcgtaataccaaaagagtacatcttgtcaagataagtcgattgtgttataatatacgacagttttgaaaaaagatagggagagatagatatgtcaggacattcaaagtttgcaaatattaaacataaaaaagagaaaaatgacgctgcaaaaggaaaaatctttacaattatcggacgtgagatcgcagttgccgtaaaagaaggcggtccggatccggcaaacaacagcagacttcgtgatgtaatcgcaaaagcaaaagcaaataacatgccgaatgataccattgaccgtggtattaagaaagctgccggagatgcaaactccgtaaattacgagtatgtttcttatgaaggatatggtccgaacggtacagcgatcatcgttgacgcgctgacagacaacaagaaccgtacagcagcaaacgtaagaaatgcattcacaaaaggaaaaggaaatgtaggaacaccgggttgtgtatcttacatgtttgataaaaaaggacagatcatcattgacaaagagaactgtgatatggacgcagacgatctgatgatggcggctctggacgcaggagcagaggatttcaatgaggaagaggacagctttgagatcatcacagatccggattctttcagcgaagtaagacaggctctcgaagaagctggtattgagatggcaagtgcagaggttactatgattcctcagacttatgtagagctgacagatgagcaggatctgtactgcatcaacaagattttggatctgctggatgcagatgatgatgtacagcaggtatatcataactgggacgagtaatcatacagacgattgttcgaactgaaaattgtgaaataatggagagagatgtcgaaaccggcgtctctttcttttttggaatgttacggttcacttattatggagaagtcagaaagaacgtttttcgactggtgcatatgaatggtaaatgtgtaaccttttttgcatctgcccttttacaagaacgctttcgtatggtataatgattttaataaatttgaatgcagaccggaagtcattccggaatgagaatcagggggttcagaatgaaaaaggttttatttgcagcttcagagtgtgtaccatttattaaaaccgggggacttgcagatgtatgtggagcgctcccgaaacagtttgataaaaaggaatgggatgttcgtgtagtcattccgaactattcctgtatcccggagaaataccggaataaattcgagtatgtaacacatttttatatgggcacaggtccttacattccaagcaaatatgtgggtgttttaaaatacgagctggatggtatcacatattatttcattgataatcaggaatactttaactgcttcttgccatatggtgatatccgttacgacattgagaaatttacattttttgataaagcagtattatctatgctgccacagattggtttccagccggatattatccactgccatgactggcaggcaggtctgatcccggtatttttgaaaacagaattccagggagatatgttcttctggggcatgaaagcgattatgacgattcataatctaaaattccagggcgtatgggatgtcaaaacgatgatgggactgaccggattcccgaaagaactctttacaccggataaactggagttccagaaagatgcaaatatgttaaaaggtggtctggtatatgccgattatatcaccacagtcagcgatacttatgcgcaggaaattcagacaccgtattatggagaaggactggacggactgctctccgcacgtcattttgatatgcagggaatcgtaaacggtattgattacgatatttacaacccggagacggatccaaagctgtttgtaaattataaccgtgacaacttccgcaagaaaaaagtagaaaataaagtgaaattacaggaaatgcttggtctgaccgtagataagaagaaatatatgatcggactgatttcccgtctgacagatcagaaaggtctggatctggttgactatgtatttgaacggattctggatgacaatactcagtttgttgtgatcggaaccggtgaggagcgttatgaaaatatgttccgccattttgcatggaaatacggtgaccgcgtttcagcaaatatctgctatgattctgatctggctcagaaattgtacgcgtctgcagatgcattcctgatgccgtccagattcgaaccatgtggtctgacacagatgatggcattccgttatggaaccgtgccgatcgtacgtgagaccggtggactgaaagataccgtagagccttataacgagtatgagaataccggtacaggattctccttcacaaattataacggcgaagatatgctcaatgtcatcaattactccaagacgatcttctttgaacggaagcgtcagtggaatcagatcgtagaccgcggtatggcaaaagacttctcctggagagtatctgccggacgttacgagggactgtacaattatctgatcggataagatttgttctgattcctatggtggaaacgtgatatttcggatttttacagaaacattgtatttgccggaaatattgcgattgaaaaattatgaaaataacatataaaaattcagatatgctcatgcagaacggctctgtgtgagcatattttttttgaaatcacacatactcaaagaaataaattagatgagaactggattttatatctatatggaaaatggaggaattgtgtgatggcagagaaaaaagccctggaaaatgaagaaattaaagagtatggacagatagagttaaacgaaaaccgccagcagcataacattcagctgctttccattatcggagaagtggaaggacatgaatgtctggcgtcaaatacaaaaacaacgaaatatgagcatgtactgccaaagctggcagaggcagaagatgaccgaaccgtggatggtttgctggtgcttttgaatacggtaggcggtgatgttgagtcaggactggcgattgcagagatgatcgcatctttaagcaaaccggtggtttcgctggtgcttggcggcagtcattccatcggcgtgccgctggcagtggcagccgattattcctatattgtgccaacgggaaccatggtgatccatccggtacggatgagcggaacggtgatcggtgcaccacagacgtatgagtattttcaacagatgcaggatcgtattaccggatttatcgcgtctcattgtatggtgaaacaggagcggatcgaggaactgatgctgaatacaagcatgctgacaaaggatctggggacgatactggtggggcatcaggcagtagaagaaggcattattaacgaagtgggcggaatcaatgatgctgtgcgccgcctgcattttatgatcaacgatgagcggatataagtgtaatagaatatatgttcggaaaaataaaaaacacagatgacatcttttggaaagtatgatatgatatacaggcgcaggaaaaagaacctgtgatactgatacgaaagatgagggcgtgtgcaatgtcattgttacaatccatactgatgggactgatccagggactgacagaatttctgccggtcagcagctctggtcatctggcgctttttaaaatattatttgatgttaatacagagacaggtctgctgtttgatgttatgctccatgtgggaaccttggtggcaatctgcattgtgtattacaaagatatcattcgactggtgatcgagtttatcggcatgctgattgacggtggctataatctggtgacctggatgcagaaacggagaggaaaagacggcgcataccgccatgtgatatataacagttaccgcaaaatggtcatgcttgtgatcgtctctacgataccgacgggcattatcggctatgtgggagcggatcttgttacggcggcttccgaggtgctgatcgttccgggaatctgtctgatcattacggcagcgctgctgtttgtctgtgaccggataccggaagggcacaagaaaccaaaacagaccagttatgccaacgcatttattatcggtatctgtcagggcgttgcaacattaccgggactttcccgttccggaactacgatcacagcctgtgtgctgaacggtctggatcgtagatttgcagtaaaatattcctttatcatgtcaatcccggcaattcttggagcaatggtattacagttaaaggatatcggtagcgaagcactgatgcgtactgacctgattcattatgcaattggtatggcagtcgcagccgtagttggttatatttgtatcaaaacaatgcttgtcattgtgaaaaaaagaaagtttaagtttttctcaatctactgtctgatcgttggtatcgtgtcgatcattggttattttgttaccacataaggttgaggaacagatagagaaaggtgttatatggcaactcagaaaagaacgacatctaccagaaagaaaacatccggaaagaagacttccggcagaaaaagttctgcaaacggaagaggaaaaagcagttctgcaccgacatttacatggcgtgcagaattgctgctttttgcatttctggcatttgcaattctcctttttatcggaaatattggaaaaggcggaattgtgggaaatgcactgagtaaattttcctttggaatgtttggtgtgctggcttatatttttccgatcccggtatttctgatcccggcatttatggtatcaaaccaacagcggacacgaactggatatacatattccgggagagcaatcatgaaagcgacggcaggaatcctgctgtttgtttttttgtgcgtttttgcacatattgtctgctggtgggatcaggtgccgggaaaggtgacacaattgtacacagagtgtgcttcctcaaagacaggaggaggactggtcggaggactgatcgggattggattttcaaaatgttttggcatgatgggagcggtactgctggatatcttgattatggtgatcgcagtagtgcttttgacagaaaaatccttctttaagggcgtatcaaaaggcagtaagcatgtttatgagtctgcacgttcggatgcagcgcgcagaagagcggcagcgcaggaacgaaaccgtgagcgtcagtctcagcgcgagcagatgacaggaaatgatagaaaaaaagaacgtcgtatgaatcggaaagtcagcggtgtggcattggacacaaagatccgtccacgaaaagaagaaaaagtgacggagaatatgagtgaattatctttgaatccgcaggatccgatcagagaagatgtgcttgccggaagtgagccgacggcaggtgcggctaagaaacgaaaaacagctgcaacggtgcagatgccggtgacggagccggaggatatcacacaggtgcagtcggatgacttttgggcgcagcatccgcagccggagattcatttatccggggagcagaatccttatccggagacgaagaaaccggtcagagaaacggcgcagccgaagactccgatgcaggatacagccggcttagaaggggcaggaatctcacagccggaaccggagttaaagaaaaggtcgcatcacggtggtcagccgaaacagtctgctgagcaggtggaacaggaagttgccgatgtgcgtgaggagatcgcagaacatgcgggggaggaacatgcgcgggcatatgtattcccggatgtttcccttttacagaaaggtgatccgaatcagacgggagattccagacagcatttgcaggaaatgtctgcaaaacttcagatgacactgacaaattttggcgtaaacgcgcgtgtgactaacgtagtctgcggaccaaccgtcacacagtatgagattcagccggagatgggggtaaaggtaagtaagatccttggactggcagatgatatcaaattgaacctggcagttccggatattcgttttgaagcaccgattccgggaaaatcagccatcggtatcgaagtgccgaacaaagaaaatgtgacaatcccgttccgtgatctggtagaatccagagagtttcaggatcatgcatcgaagatctcattctgtacaggaaaagatatcgcaggtcatgtcattgtggcagatattgccaagatgccacatttgctgatcgcaggtgctaccggttccggtaagtctgtatgtatcaatacgatcattatgagtattttgtacaaagcaaaaccggacgaagtaaaactgatcatgattgatccgaaagtagtagagctgagcgtgtacaatggaataccgcatctgttgattccggttgtaacggatccgaagaaagcagccggtgcacttcactgggcagtttctgaaatgatggaacgttatcagaccttccagaagtacggtgtccgagatatgaaaggttataataagaaggtagagtccattcaggatcttccgggagaggacaaaccgaagaaaatgccacagatcgtcattatcgtagacgagctggcagatctgatgatggtagcttccaatgatgttgaggatgcgatctgtcgtctggcacagcttgcccgtgcagcgggcatgcatctggtcattgctacacagcgtccgtctgtaaacgttattaccggcctgatcaaggcaaatatgccgtcccgtattgcatttgccgtaacttctggtgtggattccagaaccattctggatatgaacggtgcggaaaaactgcttggaaaaggtgatatgttgttttatccgcagaactatcagaagccattgcgtgtacagggagcttttgtcacggacaaagaagtgtcggatgtggtagaatatattattgaaaaaaatggtcaagtagcttataatgcagaagtcgaggaaaaagtaaatacttccgagagcagcattggaaatggcagtggatttacgaatacggcagatgacagggatgcgtactttgcagatgccggaaagtttatcatagaaaaagaaaaaggttccattggtatgctgcaacgtatgttcaagattggatttaaccgtgcagcgcgtattatggatcagctggaagaagctggtgtcgtcggaccggaagagggaaccaagccgcggcgggtactgatgagtctggaagaatttcagcaggtactcagtggaagtgatgcctaaagtgtgtttgaatctagtatatattttagagttaaagttgtttggaacattttgttcaattataaattagtaggaggtataccaatgaaaacagatatcgaaattgcacaggaagcagtgatggagccaatcgggaaggtggctgagcagatcggaatcggcgaggatgatctggaactgtacggaaagtacaaagcaaaattaagtgatgatctcatcaaaagagtacaggatcgtccggacggaaaactggtgctgatgacagcaatcaatccgacaccggcaggagaaggaaaaacaaccacaagtattggtctggcacaggctttttgtaaaatgggaaaaaaagcaatccttgcattgcgtgagccgtcccttggaccatgttttggtattaaaggtggagcagcaggtggtggatattcacaggttgtaccgatggaagatctgaaccttcattttaccggagatttccatgctatcacatctgcaaataaccttctggcagcaatgctggataatcatattcagcagggaaatcagcttggtattgatccgcgtcaggtggtatggaaacgttgtctggatatgaacgaccgtgtacttcgtaacatcgttgtcggacttggaagcaaaatggacggaatggtaagagaagatcattttgttatcacagtagcatctgagatcatggcagttttatgtctggcagatgatatggaagatttgaaacgcagacttggccgtatgatcgttgcatattcttttgaaggaaaaccggtaacagcagatgatctgcatgcaacaggtgctatggcagctctgttaaaggatgccttgaaaccgaaccttgttcagactctggagcatacaccggccatcgtacacggtggaccattcgcgaatatcgcacatggatgcaacagtgtacgtgctacaaagacagcaatgaaactggcagacattaccatcacagaagcaggtttcggtgcagaccttggtgcagagaaattctttgatatcaaatgccgtatggcaggactgaaaccggatgcagttgttctggttgcaacggttcgtgcattaaaatacaatggcggtgtggcaaaagcagatctggcacaggagaatctggaggcagtaaaagcaggtatcgtaaaccttgagaaacacatcgagaaccttcagaaattcggagttccggttgttgtaacattaaatgcatttgcaacagatacacaggcagaacttgattatatcgagcagttctgcaaagagcgtggttgtgagttcgcactctccgaagtatgggagaaaggcggcgagggcggaatcgctctggcagagaaagtactggatgctcttgaaaacaaagagagcaacttcaaagtattatatgatgataaattatctctgaaagagaagattgaaacaattgcaaaagaaatttacggtgcagatggcgtaacttattcgaatgcagcaaataaagaattaaaacgaatcgaagaccttggtatgggagatttcccggtatgcatggctaagacacagtactctctgtctgatgaccagcacaaacttggtcgcccgagcggatttaccattaatgtccgtgaagtatacgcaaatgctggtgcaggatttgtggttgtagtgacaggtgcgatcatgacaatgcctggattaccaaaagtaccggcagcaaataatatcaatgtaaacgcagacggcgtgatcaccggtttattctaaatgaatttgtaacgttctcacagtttggattggaacgaacgattcaaactgtgagaatcaacggaagatagatgtaataaaagtgatttggaggcaacatagcagaatggcaaaattggttgatgggaaaagaatttctcaggagataaaagacgaattaaaagcagaagtggcagatctggcacagcagggaaagacagcttccctggcagttattcaggttggcggagatccggcatccagcgtatatgtacgcaataagaaaaatgcatgtgcatatatcggaattggatcagaatcttatgaattaccggaggagaccaccgaagaagaactgcttgctttgattcaggaattgaatcagaaggaagaagtacacggaattctggtacagcttccgcttccggctcatattgatgaggagaaggtaattcttgccatcgatccatccaaagatgtagatggatttcatccgcagagcgcaggagcactgatgatcggaagtaaaggatttttaccatgtacacctgcgggcgtcattcagctgctgaaacgttccggtgtggaaatggaaggaaaaaactgtgtgatcgtaggcagaagtaacatcgttggtaaaccaatggcaatgctgatgcttcgtgaaaatgcaacagttaccgttgcacattccagaacaaagaatctgaaagaattgtgtaaacaggcagatatcctgatcgttgccatcggaaaaccgaaatttatcacagaagaatatgtaaaagagggtgcggttgtaattgatgttggaatccaccgtctggaaggtaagaaattatgcggagacgtggattttgatgttgtggagccgcttgcaagtgcgattacaccggtaccaggtggtgttggaccgatgacgatcgcaatgctgatgaataattgtgtagagacgatgcgctaagaggacagaacatgaaatgtgcgaagtgtggtgcagaaattcgcccgggatgtgtgtattgttccaattgcgggcaggaagcacagattgtaacagaaattaatatattggaagatgatctgcttcgttccatgctggaagaggaagaaaagagtggcagtcagacagaaacgctggtaagtatagaaaaaacggcagaaaagacggatcagaaaccgcatggtacaaagaccgcatctgattcttcgaagaaaaagaagaagcgaatgttggaaaagaaacaaaaaaaagccagaaagacattggtaattctggtggtacttttgattgcggcgctggcagttgcctttggtgtgatgcagtataatcacagcaattctgtaagttaccagctgaaaaaggcaacagaagcattggatcagaaaaattataccagtgcgcttcagtatgcagaatatgtactgcagctggattctgaaaatgaagatgcattggttctggaaggtcagatctatgtcctgatgaaacaggatgcaaaggcggaaacggttttgctgtgggtgatcgatcagaacccaagctgcaaaaaagcttatgaacagttactgagcctgtatgacagcaataattcttatgatcagattctggcattaaagagtaaggtgacagacagcaagattctgtttctgtttgaccagtatttacttgctgctccggaaatagataaagagggcggcaactataatgaatttctggaagtgacgctttctgtagatggcaaaggaatcgatatctattatacgttggatggaagcgttccgactgatgcggataagaagtatgaggatccgattcagattgaggagcagggtaagacaacacttactgcaattgccatggacaaaaatggcaaatacagtgaaccggtatccgcagagtataatattgaactggatgcgccggatatgccatctgtttatccggatggaggaacctattatgaacagaaatcggtacatgtgacagttccatccggaacaacagtatattatacctgggatggcagcacaccgaccagtaattcttctgtatatcgtgatgcacttgatattccggaaggaaataatatactgtccctggttgcaattgatgataatggattgtcaagtgaagtactgaaatgtaattatatctattatccgacatctacgacagattcagatacacaagatggagcatcttctgatgctgaataacaaaagtgatagaaatcctgagataatcagttaacaaaaaagcaattggtaagattgttagtataacagtctttatcaattgcttttttgctattctacaaacaggaagtatttgtaaagtgatacattttatctcagtcgagaagactcccacttctgcaagtggtgagtaataacaagtctttctcagtgggagtacaatctccgactgagataaacgctccgcggggatgtgcagtgattctgggaagaatatgtcagctttcgctgaccagaatcacgcaccaagtctcacgtgcgttcgacttgaattttattcagaaatttccaacggctcctgcgtctgactttctccacgccgccatacataaagcagatcttttccgatgacaacacctttattttcatctgcgctctgaattgctgctgccatatcctttgtcgcaaaaataacctgacctttcgcatagacataatagtcactgaacgcattcaggtttttcatttcgattgtcacggattcctcattcagaatctgtttcgggatcacctgttttggtgcttttccagaggattccgtactcagcgtgatcacaacctccgtctgttttaccgtagaagtcgtggttgacacgttcaccagattttcatcctgcatatcacgattcatgatcgtatcttccgatgcatccgtataggtatctccggattttgccactctggacaggtaaatgctgccatcctgcacccggatacctgtcacatacatgcccggactctggtaagttttcaaaatctgatgctcactgtcgccagaatccatgatcaatacctgactcagtgccagcgtattggtctgcgtatccgtgctgaacacatctgacgtataaccccatccataaatacagtcgcttccgataaatccaagcggtttcaaagtctgaccactttccgcattaacatcgtaagtatcgcctttttccagatctgtcacatgcatgacgcctccatcttctgaccatgcaatatgccgtccgtcttcagaacttacgatcatatccgactgcagatcgctgataaaaatctctgattttttcgtatccagattgatcttgtatacctgatcagaaatagtcagataaaaatatccgttatccgatacatacattaacgtgccaagctgctcttttaccacctgataggataatgtcgtcggaataaataacatttcctccactgtattggtcacacagtcataatggcatacgctgacacccacctgaccttcatgctctccacggttcatatagccatatacgacaaaatcgatacttccgccctcatcggctttcaggatccggatcgcatgctcatcataattttcccgaatgtccatgtcatcgccacttcggaagctgaatacctgtgtcattttgttctcagactgattgtagctccacagctctccctgctgtacaaaacagataatatttccggtttcattcgccttgtaatccaccacatcggaacggatgccaagattaatggaatccttggatacatgggcaccgtctccctggaaaatttcttccatggtccgttcaaaatttaacagataaattttctctgcaccgacacgcacccggtaatattcctgcacgttataatattctgtctgaccgttctcattgtcggcagataaaatatattccagcaaaataacctgatattcatcacacatttccttgatggatgccaccggttctgtcacttctgttccctgcagatccccccagcaagcctgagaaagactgttgttgatggtaacggtctgcaaagaagtattgtctgcatccgcagacggctccatataagaagcaagctctgactggcggtctttgtccatagtgatcgcatgaaatccttccacaaaatccacacaggtactgatctgactgtctccggcatccttgatccgggtataataacttgcagttgtatcgccctcttttaccttcaggatcagctgatattctgtggttttttccaacagattttcaacggtgatctcaccttccattgcgctctcatcgccggaaagcgtaacttttccatcctgaaccagtctgcttccgtccagactgcgcacttcaaaggtcacactgtcaatatttttgccatacggatcaatgcgaagcgacagcttatggttatccggaaggggcgtgatggtatcacgcatggaaaccgctgacatttccgccgtatagccatgcagctcattgactctgtgcccgttatcctcaaaatatacgattgggagggaagccgccggcatatccgtcgtcagatccttcgtttcatggtttgtgatcttggaaaaagtaaataatgcaacgataaacaccgccacaaggataaaaaactttcgtattcctttacgcatctgctgtattcctttctgttctcagcaacgccgccagcgtcggtgacacatgcagttcctccatcaattctgtcagttccccggatgttttttgctttccggattttactgcccgcaataaaatatttttcggcgtatgctccatatcaataaattccagtacctgcacctgatagcctgcttcttccagcagatttgcacggatcgcatcggtcaaaagcgccgacatccgttccctgatcagtccatacttcaaaaccggctgcaacagatcattctgaatctgtttattcacttcgtgctgacagcacggcacagacaaaatcacttttgcgccccattttacggctttttccagcgcataatcagtcgctgtatcacaggcgtgcagggttacgaccatatctacatgatccacaccctcatactgtgcaatatcacccgtcaggaaggacagtttttcatatccgtattcctctgccagattctgacaatgcgcgataacatctgctttcagatccaatccgatgatccgtacatcatagtgtttcaactcatgcagataataatacatggcaaacgtcagataagacttgccacaaccgaaatctatgataacagattctctgtcttttggaagctccggaacgatatcttcaataaattctaagaaacggttcatctgacggaacttatcatatctggaatgaactattttgccctctttggtctgaaccccaaggtcgatcagaaacggaaccggaatctccggatctaaaatatactgtttcttccggttatgtgacaggttcgctttcggaaccggacagccggattttgacctgtgtaccgaccgttttccttttttgctgatcagcacctgaatgtgctcctgcggatgcagcgcctctaactggcggaacccttctgtccactccgcaatcttctcataacattctgcttctgtcaggttgtaatgctgcacctgtttttctgtgtaagcacttgcctgaaacatgagtttttcctttaataataccggtcgtatctcaatttttcgcactccatcttttttgcgcggaccgctgataatgatttttgccaactgctcattcatgcagccagtcagtatttctttccatggattttctatcataacgtttctcttttctactacaatatatttgtgttcaagtcgaacgcacttgagacttgg

SEQ ID NO: 13235 - DNA, 1927 bp, Unknown
  gut microbiota DNA sequence
tttattggaaatcaatttaagtcgtttccattatagggtatctttttgcgacacacaagacctaataccatctccgacaccgataatgtctgcatcttctgcgatacatttcctgcataagcattacctgtaccagcataaaatatttttcatccacatgcagacgcccatcctcttccacatcttccggccgcaatccccggtaaatccttcggcagatcatctccatcatcagccggtctggataccggtcaaacatcatgctgccttcatattccatccgatcgcattcctcatccaccatactctgaatttttctggcatcccgcggatacatttcctgcagacgtttgcagtctttttcatactccgtctcctcaaatacggtattctgcatcggatatgtcatataaaatggcattttttcgcgggtatacggatcctgctccagccactgaaatctttcctgtccaaaattcatattgcactccaaacgatactttcaccacaacatatgcaaaaatctgcaaatctgtgctatagtaataccattatggaaaaagatttaacaaaaggaccaatctttaaaaccctgctgctttttgccctgccgatgatgttgggaaatctgttacagcaggtctacaatattaccgatacgatcatcgtcggacgttttcttggttccggcgcactggcagccgtcggcagcacttacaccctgatgacctttctgacttctgtcatgatcggactctgtatgggatgcggcgcgctgttttccatgcattacggcgccggccggcaaaaagaaatgaaagaatgtatgtgggtttctttctggcttgttctgttggtgacgctcctcatgtacctgatcgtgtttatcggaacggacgggattctgacagtgcttcagacaccggaagacatttatgagctgatgcgcatttacgcccgcattatttttatcggcattggatttacatttttatacaattattttgcctttgtcctgcgggcagtcggcaattccatcctgcccctgatttttctggcagtttccagcattttaaatatcgtgctggatctgtggtttgtaatcggactgcagcttggtgtcggcggagctgccggtgccacggtgattgcacagggtgtctccggtattggcattacaattgctgctttatggaaaaatccacagcttttcccgaaaaaggaacagcgcattttccggaaaacaacgttttcagaagtgggacgctacgcctttttcacctgtctgcagcaatccgttatgaactttggtatcctgatgatccagggactggtaaacagcttcggtactgcgatcatggcagcttttgccgccgcggtcaaaatcgatacgctggcatacatgccggtgcaggaatttggcaatgccttttccctgtttatctcccagaatcatggtgccaaacgtccggatcgggtaaccgccggaatccgcactgcggttcgcgtgtcgattcttttctgcgtgatcatttccgctgttgtctggatctttgcccgtccattaatgcagatttttgtggatgcaggtgaaacgacgatcattgcggaaggtgtacgttatctgcatattgaaggtgctttttactggggcattggttgtctgtttttgctctacggtctttaccgcgccatcgaacgacctgccatgtcactggtgctcaccatcgtgtccctgggaacccgtgtggctctggcttatgcctttgcaccgcataccccgcttggtgtcagcgctatctggtgggcgattccgattggatggattctggcagatctgaccggatttctttattatagaaaaataaaaaaactgtgagaaacggaaatttttccctctcacagttttttattttttagtcatcca

SEQ ID NO: 13236 - DNA, 594 bp, Unknown
  gut microbiota DNA sequence
aattagccagttgattctgaaacgggaaaaactttttatgagagtttgatcctggctcaggatgaacgctggcggcgtgcttaacacatgcaagtcgaacgaagcactttacttgatctccttcgggattgattgttctgtgactgagtggcggacgggtgagtaacgcgtggataacctgcctcacacagggggataacagttggaaacggctgctaataccgcataagcgcacagcaccgcatggtgcagtgtgaaaaactccggtggtgtgagatggatccgcgtctgattagctggttggcggggtaacggcccaccaaggcgacgatcagtagccggcctgagagggcgaccggccacattgggactgagacacggcccagactcctacgggaggcagcagtggggaatattgcacaatgggggaaaccctgatgcagcgacgccgcgtgagcgatgaagtatttcggtatgtaaagctctatcagcagggaagataatgacggtacctgactaagaagctccggctaaatacgtgccagcagccgcggtaatacgtatggagcaagcgttatccggatttactgggtg

SEQ ID NO: 13237 - DNA, 957 bp, Unknown
  gut microbiota DNA sequence
ttggctcccaccactgatactaacttgtttctcaccacctatagaggtgggagtcatctcccatctgatataactatttttgataaagtttgacttggattttagaggagtttccgtgaactattttttagagtagacaatcaatccctaagtatgctatgttagatgtactgcgcctctaggcgccaatctcaacagggaggatattaacgtgacaaacttaatgtctgtatttgagatcatcggttccattgcatttgcaatttccggaagcatgctggcgatcaaaaaagaaatggatctgttcggtattctgattcttggtatcgtgacatccgtaggcggcggtgccattcgtgacattgtcatcggtaacactccgcctgcgatgtttcagaatccgaaatgtacggttatttcatccattacggcaattgttgtatttctgatctggaaattgtacaacagaaataccattgcagaaaaaatcgcccgtcgtacggataacatgtaccacaatctgttgttctggtccgatacattgggactggcagcatttacgattcttggtatggaagctaccatcagtttcctgcatacggatcagtgtctgctcatcgcatttgtcggtctgatcacaggcgttggtggcggtattctgcgtgatctgctggcaggagagattccttatgtattgcagaagcatatttacgcaacggcgtgtattttcggtattgcagggtactatgtgctgtatcactttataccggaaagtattgctgcattgatcggattttgcctgattctggtcgttcgttatctggcaaaacagtttgagtggaatctgccgcgataaaaggcaaaaatgatttcaaaatttatgtattgaaaaagaaatctggtcgttttgtcttgcacgctaacaatcgcttagcaagaaaaaacggccagatttct

SEQ ID NO: 13238 - DNA, 257 bp, Unknown
  gut microbiota DNA sequence
tcccacttctgcaagtggtgagtagtaacaagtatttctcagtgggagttcaatctccgactgagataaatgttccgcgcggatgtgcagtgattctgaaaagaagatgtcagcttgcgttgaccagaatcacgcaccaagtctcacgtgcgttcgacttgaatatagtacaaagcaaatatcatacaacgtaaataaagaaatctggccgttttttcttgctaagcgattgttagcgtgcaagacaaaacgaccag

SEQ ID NO: 13239 - DNA, 280 bp, Unknown
  gut microbiota DNA sequence
aagtgtcatggataatgggtatggaatgttccgggagctgctggaatataagctgaaatgggaaggaaagaagattgtacgggtggatcgcttttttccatccagtaaaaagtgctgtaaatgtggcagggtgaaaaaagaactgaaactttcggacagagtatacatctgtgcgtgtggaaatcagatggaccgagatctgaatgcagcaatcaatatccgtgaagaagcacgtcgtatgctgttggcaggatagacagaaactgtctgtaaccagacc

SEQ ID NO: 13240 - DNA, 489 bp, Unknown
  gut microbiota DNA sequence
gataatacttttctgctcccgtcttttaatcttcccaaatgaaccataatatcaagggccgacgcgatctggctgcggatcgcatctaaaggcagctctgctcccataagcaccattacttccaaccttgaaagcatatcctggggactgttgccgtgaccggtagataaagaaccgggatggcctgtattcatggcctttatatggactccctatgttcccatcatgcagaaatacaatatctgtacttaatacacaatgtatataacgttattatcttgccatttcacagttgcaaaaagaaaagagaacctttcacagccctctttcatatcgactttctcattcatttatcatactcaacagtttgtcaaccaatgtctctaaactttttcccaaaaatgggacaaagtctggtattgcaccaaatgccatcccaattattatcattcgaccacattctcttgcagattccaatgcaaatccata

SEQ ID NO: 13241 - DNA, 3244 bp, Unknown
  gut microbiota DNA sequence
atgtatgttaaaataaaaagggtgatagattatgaaagatataaacatgatatacacagatttgattcatcaaaaaagagaagcagaagcacgtttgacagaatatcaagaaaaactagagcagctgcaagagaggaaaagtaacattataataaaaaaaatcaatggggatttatactattattcccaacatcgtgaaaatggaaaagtggtcagtaagtatctgggagcggtaaaaccgggaagtattgcagacgaagaaaaaaagcagatgcagatttctgatttgtcagaaaaagtgaaaaatttgaaattagatattgagagcctggagcagatgataaaatgctatataaaaaggaaaaagcaggattctattttggataatttttcgtttgaagtatactggaaagacgatattacagcacgtgtatatgtaagaggaaagaatgttacagtatcaaaatatacggaaaatccgggaaaacagcttttcgcagagaaaaaaatgacgcgatatcagcttggaaagatttttgaaatgcgttgttgggaaaagggacgtgcggatatcaatgagattttggaaaatctgggattaaaagaatacaatccatatgaaatagttcgaaaaacacatggagtaagttataacgattatatatggttccgatttccgggagaacagttgacaagcaaagatgtgttagtgagggattgatatgttttgtgagaatattgaaagtcaatatatcgtaatgcaggaaggaaccagtgagggaacccagataaaatataaaaaagatggatattggtacaaaaaggatagccggggaaaggaaggcaaaatatcggcgtttactggagaaataaacgtctcctttggttgacgataaagctctggtggcatataatactaggtatgtaaaggagtagcagaaacatgagtaaaattattttgacaggtgatcgcccgacaggccgtcttcatgtcggacattacgtgggatcattaaaagaaagagttcgtctacagaattccggactgtacgacgaagtttatattatgatagcagatgcacaggctctgacggataacgcagagcatcctgagaaagttcgtcagaacatcatccaggttgcactggattatctggcatgtggtattgatccggagaaagcaacgatctttatccagtctatggtaccggaactgaccgagctgacattctattacatgaatctggttaccgtatccagagttcagagaaaccctactgtaaaagctgagattcagcagaaaaactttgaatccagtattccggttggcttcttctgttatccgatcagtcaggcagcagacattactgctttccgtgccacaaccgttccggctggcgaggatcagatgccgatgatcgaacagtgtaaagaaatcgttcataaattcaacagcgtatatggtgagacactgacagagccggagatcgtacttccgaccaatcaggcctgtttacgtctgccgggtatcgatggtaaggcaaaaatgagtaaatctcttggaaactgcatttatctgtccgatgaaccggatgagattaagaaaaaagtaatgtccatgttcacagatccgaaccatctgagagtagaagatccgggacgtgttgatggaaatccggtatttatttatctggatgcattcagtaaaccggaacatttcgcagagtacctgccggattatcagaatctggacgagctgaaagcacactatacccgcggtggtcttggcgatgtaaaagtaaagaaattcctgaataacgtacttcaggaagaactggcaccgatccgtgagagacgtaaaatgtgggagcagcgtattccggatgtatatgatatcctgaaaaaaggtacagaagttgctgagaagaaggcagctgctacattgaaggatgtacgtgctgcaatgcagattaattattttgattaataaaaatatccctgtaggaaattgcttgtaaaagcatttctctacggggattatttttgtcgaagataagagtattggtttactgttttgaggacagccattcttgtaaagtttttgcatctatcttggaagcaagttgcactatttgggaaaactatggaaagccttgtatttactggtttgaaagaaaaaagagggaaaatccaaggaacgtagaagccaaaatggctcatttttgtgaataatgccatgagtatctggtaaaaataatttcatagaatacataaatctgcgaaattatcacacaaaaaaagatcagtaacgcctgaaaacgttactgaccaccctgtttgatctgatatataactttttatcctgcacactgaatcaacggcttgaatttctgcatctgtattttcttgtactccatagaagaatggaaataatattccattgtgatcttgatatccgcatgtcccaaaatttcactgagagttcgaatatcccatcccaaagtaatgcatcgggttgcgaaagtatgccgcaggcaatgaaaatttaaatatggcacttgtatcttctccagagtatttttataaaaatattgtagcgttcgtggatctaatggcgtaattccagattttgaaaagagatacggatgtgattcagaaaaaagcaaatgctcttttaaaaaaacaattatgaaatttggaagtggaatcaatcggtatgcatttttgcttttgggctctgatatcactaattccgtctttttatgatttgctttttgttgggaaataacaacggatctttgcaccgttcggacgatttttaaatagccatcggcgagattcagatcatcatatctcagggcacacaactcaccaatacggattccagaatacaaggccagtaagattgcgcaggcatacagagacggatgatcaaataaatactgttccagtaaagattgattttccttggaaaaaacgcgaaccagatgacggtcgcgtgataattttggagacaatttcagacgtagttgtaaataaccatgttcatatccatagccgagcgtacgattcaaaatcatacacacacagcgaagcgatgtggtagacagttttttttcattagatggatcctggtttaatgattcgtaaaaagcccggatgatttcctgtgaaattaaggcacagtcgatgcttttaaaatacggtttgagatgtaaacgtgtaatctgttcatatttgcaat

SEQ ID NO: 13242 - DNA, 721 bp, Unknown
  gut microbiota DNA sequence
cgaagcagccacttcagcctccagtgtagctttgatatcgcgagaggaagctccaacaaggaacttatagtttccaggagctaccacccatgcagatgcagcctcatcataggaagccaggtcggcagcactcactttcaacgttaccacagtagcttcgcccggtttcagttccttggttttggcaaaggctttcagctccttttcgggcttgttggcgtctgcagcatcgggagcggatacataaagctgaaccacttccttgcctgctaccttaccggtgttcttcacttctacagatacggtatagacgccgttgtcagccttgacagcagccttgtcgtaagcaaaagtggtataggaaagaccgtaaccgaaaggataggaaacctgcttgccgaaggtgtcgaagtaacggtagcccacgtagatgtcctcttcgtaattggtataatccacattcttcacgtcgttcttcttcccgcccttgttcacgaggtcgatgcttacgcgcatgtctatcgggaagttggcagaagaagcggcatcttcaaacttcaccgggaaagtcattgtcagcttgccgctgggggaagccttgccactcaacacgtcggccacactgtttcctccctcctggcctgcctgccatgcacaaagaatggcatcgggaacagatttccaagaagcggtttcaatcacaccaccgatgttgagtacc

SEQ ID NO: 13243 - DNA, 41217 bp, Unknown
  gut microbiota DNA sequence
gaacaaaaacaaagtcgcaagagtagattctatcgatgatatttcctatggtcaggcatttatgatcggtgtgttccagatgattgctgcaatctttccgggaacatcccgttccggttctactatcgttggttctttgatgcttggtatttccagaacagcggcagcagaatttacattctttcttgcgataccggcaatgtttggcggaagcgcgatcaagattttgaaatacgacggtggatttaattcctcagaagttgcattacttgcaatcggtatgatcgtagcattcgtactttccattatcgcgatcaagttcctgatgtcttacatcaaaaaacatgatttcaaagcgtttggctggtaccgaatcgtacttggcgttgcagttattggatatttccttgcaaccagataagtatcgttcaatttatacaaagtagccatatctaatacatgcagtattttatattgtaaaaatggcaaaaatttttgaacatatttatctcagtcgagaagactcccacttctgcaagtggtgagtaataacaagtctttctcagtgggagtacaatctccgactgagataaacgctccgcggggatgtgcagtgattctgagaagaatatgtcagcttgcgctgaccagaatcacgcaccaagtctcacgtgcgttcgacttgaatttatgtaagagtattgtatagatagcaattttttgttgcattatttcataaacgtacaagaaggcagagtcagatttttctctgggagcgattgttagcgaccgagacaaatctgactctgccttttcacaacctataaaatagccacaaaacaaactaaatagtgttccattttgtacaacttacaaaaatagccacaaaacaaactaaaaaagttccacttttcacaacgaaccgtaacagccacgaatcacttcttttttttacaagtttcaatttcatttttgtacaaatcccagatgaaatcccaccaatttaatggtacaataagtacagttaatcagtctgaaataaatgactgacaaaattcatgaggaggaaaaacgaaaatgggagatcagaaactgacaggtcgtgtaacaatcccgacagatattgatgtcgttccggagacactggaactgatgaaacgctggggagcagatgccattcgtgactgcgatggaaccgattacccggaaggattaaaagatgtagctgcgaaagtgtattctacttattatacaacgagaaaggataacgagtgggcaaaagccaatccggatgagattcagcagtgctatatcatgacaaaattttatactgccgaatctgacaaattatccattcatctgatgaccggtatttatccggaaatgctgaaagtaaacagccacgatgacattcgccgctggtgggaagtcatcgaccgtaccactggtgaagtagtaagctgtgataactggtcttattccgaagagaccggagatgtgaccattgatccggcgacaccattccatgattataccgtaagttttctggcttatatcatgtgggatccggtgcacatgtacaatgccgttgtcaacgactggaaagacgtagagcatcagatcacatttgatgtgcgtcagccaaagacacataaattcagtatggagcgtctgcggaaattctgtaaagcaaatccgcatgtcaatgtcatccgctataccacatttttccatcagtttacgcttgtatttgacgagcttgcaagggaaaaatatgttgactggtacggatattctgccagtgtaagcccatacattttagatcagtttgaaaaagaagttggttacaaattccgcccggaatacatcattgatcagggatatttcaacaatcagtaccgtattccatccaaagaattcaaggatttccaggcattccagcgcagagaagttgcaaaacttgccaaagaaatggtagacattactcatgaggaaggcaaagaagctatgatgttccttggcgatcactggatcggaaccgagccgtttatggatgagttcaagaccatcggtctggatgcactggtaggaagtgtcggaaacggttctaccctgcgtctgatcagtgatgtggaaggtgtaaaatacagagaaggcagatttttaccgtatttcttcccggataccttccatgagggcggtgatccagtaaaagaagcaaaagaaaactgggtaacagccagaagagcaatcctgcgtaaaccgatcgaccgtatcggatacggcggatatctgaaactggcctgcgaattcccggaattcatcgattatattgagagtgtctgcgatgagttccgtctgctgtatgaaaatgcaaaaggaaccacaccgtattgtgtaaaaaccgttgcagtattgaacagctggggcaaaatgcgttcctggggctgccatatggttcatcatgcattgtatcagaaacagaactacagttatgcaggtgtcattgaagcactgagcggcgcaccgtatgatgtaaaattcatcagctttgacgatatccgtgcaaatgcagatattttaaatgacattgacgttattatcaacgtaggtgatggcgataccgcacataccggtggttacgaatgggaagatccgcagatcgtagaggctatccagaaatttgtatacaacggcggtggatttatcggtgtcggagagccgaccggacatcagcatcagggcagatacattcagcttggcaatgtgatcggtgtggaaaaagagaccggatttactttaaattatgacaaatataactgggaaaatcatccggatcactttattttagaggactgcacaaaagatgtcgacttcggagaaggcaagaaaagcatgtttgcccgtgaggataccgagattctggttcagcgcgacaaagaagttcagatggcagtgcatgagtttggaaaaggacgttctgtatacatcagcggtctgccatattctttcgaaaatgcacgaatcctgcatcgaagtgttatgtatagctgccacgatgaggcaaacttaagaaaatggtattctgagaacttcaacgtggatgtacatgcgtatgtggcaaatggcaaatattgtgttgttaataatacttacgagccgcaggacacagttgtttaccgcggagacggaagcagctttgaattacaccttgatgcaaatgagattaagtggtacgaaatttaaaagaataatagcgtaaacgtgtaagataccttataataaacgatagggtatcttacttttttgtgggattgttgaaaaataagtggaaaaagaacaggagcaaaaaatcatggcattacagctcatttacggaaattccggcagtggaaaatcaacctatatttatgaaaaagtcattcagatggcgcaggcagaccgcaggcgcaatttttatgtcattgttccggagcagtttacaatgcagacacagagggagctggtgcgccgatccaaaaatcatgtaatcgtaaacattgatgtggtcagttttgaacgtctggcatatcgtatttttgatgaacttggcattcagaacacggttatggaagaaaccggaaaaagtctggtattgcgtaaaattgcagaggaaaaaggcaaagagctgacggttttacgtggaaatatccgaaaaatggggtatatcaatgagctgaaatccatgatttctgagctgatgcagtatgatatttccgtagaagaactggaagattttttgcatcagttaaaaccggattccaatctgtattataaattatcggacgtgcataccatgtatgcggcttttgaggaatatctgcagggacagtacgtgacagcggagcgagtactggatgtactggcagaagcggtggatgattccaaattgctgcgggatgcagtgtttgtatttgacggatttaccggatttactccggtgcagatgaaattgctgcatcgctgtatgcatgtggtaaaggatatgtatgtgacagtgacaatggatgtgcgggaagatccgttggcagatcacgggattcaggatctgttttacatgagccggaaaatgacggcggcattgttgcgggcggcaaaggaagaaacatatattgtagaagaaccggtatttttaccagttggtgaaaatagccgtctggcgcaatcgccggtgctggcacatctggaacagaatctgttccgggtgcgcagccacagatatgaggaaaaatgcggggaatcgttacgcatttattcactggcaacaccaagggaagaacttatctttgctgcatggaaattgtcacatttgacgcgggagaaaaattatcgttatcatgaatgcgccattgtatgcggggatgtggaatgttatgaaaagtatgcaaaatctatttttgaattatatgatattccgtatttcgtcgataccaaaacgtcgattctgtatcatccatgtatcgaactgatccgtgccgtattagaaatggtagaaaaagatttttcttatgaaagtgtatttcgatttttccgaaccaatctgtccgggtttacggaaaaagacattgattttctggaaaactatgtgctggcgcggggcattcgaggagcctctaaatggaagaaaaaatttttgaaacctatgcgtcataccggcagaatccgcgtggaagaacaggtactgcagcaggagctggcgcgcgccaatgcgctgcgggagcgattctggaaaatgttagagccgttttatctggcagcgtcagaaaaagaagttacggtatccgaaatgacaaaggcattgtatgatttgctctgtgggttacatctggaagaacagatgaaagagcagcaggaagcctttgaggaagctggagaagaattgctggcgtctcagtatcgacagatttacaaaatcgtgatcgatctgctggataaactggtggatctgctgggagaggaaaaactgtccatccgggattatgcggacgtgctggaggaaggctttgcatcggcaaaagtaggagcaattccaccgggagcggactgtgtgattctgggagatattgagcgaacccgtctggaaggcattaaagtgttgtttttccttggcgtaaatgatggcacgattccgaaaagtacggcaaatggtggaattttatcccagtatgaccgggaactgatcgaggagcagaagctgcagttgtcaccgactgccagagaacagtcctttttgcagcggttttatctgtatctgaacatgacaaaaccgtcagaggcactgtatctgacgtatgccagaatggatacgcagcagaaggcgacacgcccgtcctacctgatcggcacggtgcagaagctgtttccaaatgtgattgtagaggaaatagaagcagatgcatccggaacaccggtttcaccaaaaagcagtctggagacttatatttccggtctgacacaggcgaaagcaggaagcattacagaagaatggaaagcgttgcaccggtatctgagtgaatcaaaagaatggggatctgtggtacatgaattgtttgcagcggcattttcccagtttaccggagagcagctggcagtcgagaccgcgcggcaattgtatgggacggtgctgaccaattcagtgaccagactggagctgtttgcccgttgtgcctatgcacattttctggaatatggtttgaaattgtctgaacgggagacttacagttttgcagcgttggatatgggaagcatgtttcatgagattttgcagcggtattgtgaaggtctggaaaaatcctatgactggtataccatcacagaaccggaacaggaaaacttgctgcaaaccgctatgcaggaagcagttctttccatgccaaatgaatccttgctggaatctgccagaagtgcctatgtattggaacggatctatcggatcatgaagcgcagtatctgggcgctgacggaacagatccggcatggaactttcaaaccggcgggctatgaagtggattttgtgcaggtaaatgagttaaatgtggaaaatatgatgctggatgcggagcataagatgcgtctggtaggaaaaattgaccgtatggacacccgcgagacggaggatgccgtatatgtccgcatcattgattataaatccggaaaaacaacgtttcagttgttgaatctgtattacggacagcagctgcagcttgtggtgtatctgaatgccgccatggagcagctgaaaaaaacacatctgggaaaagagattgttccagcgggtattttttactatcgaatggatgatccgatggtggacgcagatggtgaggatgaagaaaaaatcatggaacatatcttaagtgaactgcgtctgaatggtctgatcagtctggaaccagaagtttatcagcagatggatgtaggattggcgggcagatcggaagtccttccattgacactgaaaacggatggaacacctgcgaaaaagggaacatcgggagccggacgcagggattttcaggcgatgacagtctttgtgaatcgaaagatctgtgatgcggcagaaaaaatcctgtccggtgatattgatatccgaccgtttcagatggatcagaaaaccggctgcgatcactgtccgtatcatagtgtgtgtggctttgatccgaaaattcagggattcacctatgaaaaaaataagaaattaaaggatgaagatgtgtgggcgaaaatttatcgggaaggaggtctgccggatgagcgttaagtggacaaaagaacaggaaaaagtcatcaatctgagaaaccggagtctgcttgtctctgcggctgccggttccggaaaaacagcggtgctggtacagcgtattatttctatggtaacggatgaaacagatccgctggatattgaccgcctgctggttgtgacctttaccaatgcggcagcagcagaaatgcgggagcgtgtcggtgccgctattgagaacgcattggaacaggatccgtataaccagcatttgcaggggcagctgacgctggtgcacaatgcacagatcaccaccattgacagtttctgcattcggattctgcgggatcattttcacaaaattgatctggaaccgggatttcgcattgcggatgaaggagagctgaaactgcttcgtgaggatgtctgtgaggcggttctggaagatttttatcaaaaggcagatccggagtttttgcggtttgcagacagttattccggtgcaaaaaacgatttacaaatcaaagaaatgatcctgaaattatataattatgcggaaagctatccgtggccgaaggaatggctggagacctgtgtgcagcaatatgaagccgccaatgaagcggaactggaagaaaaaagctggatcagagattttctgtcatatttaaatgtacgtgtggaggatctgatcactgctcaggaaaaattgctggagctgacacaggagccggatggaccatatatgtatgaggcatccattgccgatgacctgcggcagttggaaaatttgcgaaaatgtgaacatttttctcagtggcaggcagccatttctgccattgattttaaaaatatcggaagatctggaaaatacgaaggcagtgtggcaaaaaaagacgcggtaatgtccgggcgcaagcggatgaaggatcagattgacaagtggaaaaagacaatttttgcgacaatgctggaggtgcagttagagcgtctgacacagacgtccaaaatggtgcggatgctggtgacactgacgcaggcattttctgatcgttttcaggaagaaaagcagaagaaaaatatgctggatttttcggatgttgagcacaatgcgctgcgtgtactggtggattcggaaacgaaagagctgaccgaaacggcgctggaatatcaacagcagtatcgggaagttatgattgatgagtatcaggacagcaactatgtacaggaaacattgctgacagcggtttccggtgtgaaaaatggaaacgaaaacctgtttatggttggtgatgtcaagcagagtatttatcggttccggctggcgcgaccggagctttttatggacaaatatcatcggttcagcaccgaggagagcagtcagcaacgcattgacctgcaccgaaatttccgaagccgctgggaagtggtggaagcggtaaatgatattttttatccgctgatggaaaaagatctgggaaatgtggcatatgatgcggaggcagctttgtatgcaggagcggtgtacccggattatgagaatgcggattgctgtaagccggagcttttgcttgttccttcccaggagagcggcatggaacgacgggaacaggaagcagcggctgtggcaggtcggatccgggaactggtggagacacaggaaataccgggaatcacgtacaaggatattgtactgttactgcgttccatgtccggttgggcagagacctatcagaaagtgtttgagcaggaaggaattccgctgatcgttgcgtccaaaacaggctatttttcggcaacggaagtacagaccgtgctttcactgttgcgtgtgttggataatccgtatcaggatattccactggcagcggtgatgaaatcctattttggaaagttttcatcggaggaactggcacagattcggtcggaatatccgggaatgccgttttatcagtgtgtggaacagatgctgcctgtatcagagaaaattattgcctttcaggaaatgctgcagaaatttcgtcagcggattccgtatacaccgattcatcgtttattgcaggaaattctggatgagaccggctaccgtaattatgtggcagcgttgccggctggtgaacagcgccgggcaaatctggatatgctgatggaaaaagcagtggcatatgaacagaccagttatcatggattatttcactttatccgctatattgaccgattgatgaaatatgatgtggactatggcgaagcagagattgtcagtgagcaggaaaatgctgtccgtctcatgagtatccacaagagcaaaggtctggaattccccgttgtgtttgtctgcggtatgggaaaacagtttaatgagcaggatctcaacagcaatatgatctttcacccggaatttggtattggattgaaatggtttgactgtgagaaacggacgaaagccaacacactgattcaccagatttttgctatggaagcaaaaaaggaaaatctgggagaggagctgcgtgtgttatatgtggcactgaccagagcaaaggaaaaactgattctggcaggaacctgcaagctgccggaagaagggcaatacagcggtttttccagagaggaaaaagtaccgttttccacccgctatgatgcgaaaagttactgggattgggtaataccggtgcttggtatggagaatccggattaccgttacgtgatctgggatgaggcgcggatgcagcaggaagaacagcgaaaattacaggatacagcattggaacatcggacacttctggaagcgttgcagaacgtatcagaaacggaactggcgcagctaaaagagacgttttcatgggaatatgcatggaaagaagaaggcgcacacaagcagaaagtgtcggtgtcagaattaaagcatcgggcaatggaagaacggagtgagtcggcagaacagactttgaataccgcacaaccattgttcccggatgaaattgcgacaccgtatgtgccgcggtttgtgcaggaagtaaaggaaaatgcaggtgcactgtatggaaccatggtacaccgttttctggaatgtctggatttcgcaggacttccggattttgcagatgaaaagcagggactatattttgtaaaacagcagattgatgcattgtgtgcccttggacgtatgcaggaagcggatgcaaaacggttaaactggaagcagctgcttggatttttacagagtgatactgcaaaacgaatgcgtgcggcagcagaacagggtgctttagagcgggaaaaaccgtttgtaatgtcagtgccggcaaatctggtctgggaggatagccgtccggaagaagatgtgctgattcagggtatcatcgatgtgttctgggaagaagcagatgggattgttttgctggattataagacagatcatgtagacaatgcgcaggaactggtgcgccgttataaaaagcagttggagctttatgcggatgcactgagcagattttcggatgaaaagccggtgaaggagattttgatttattcctttgcgctggcagagacaatattactttaaataaatggagagaattgtatatgagaattattttagcatcagcatccccgcggcgtcgggaactgctggctcagatgggaatggagtttgaagtatgcccgtcacagggagaagaaaaaattacagaagtgctgccggagcgtgccgtgatggagctggcgcagcagaaagcagcggagattgcagtaaaaaccgaaggagatgcatggattctgggggcggacacagtcgtagtttatgaccagaaaattcttggaaaaccaaaggatgcggaagatgcaaaacggatgctttgcatgctgcaggacaagaaacatcaggtgtataccggcgtgtgtatctggaaaaaggaaaatggaacagaagatgtgcgttgcttttttgaaaaaacggatgtggtcttttatccgatgacagaggaagaaattgatcagtatgtagctaccggagaaccgatggataaagccggttcttatggaattcagggcgtgggcggtctctatgtccgcgaaattcatggggattacaacaatgtggttggtttaccgatcgcacggttataccatgaattaaagaaatagatcatctcagtctgagttgagactcccacttctgcaagtggtgagtagtaacaagtctttctcagtgggagttcaatctccgactgagataaatgctccgcgaggatgtgcagtgattctgaaaagaagatgtcagctttcgctgaccagaatcacgcatcaagtctcacgtgcgttcgacttgaatgtctttcgtacaggtgttgagcaggattaaaatttgtttaaaacttgaacgccgctggtgaacatctgtttttgttgcgggaaatccacaacaatggtatattaaaaatagcggtgtctggttttgacagatagaatggagagaagccgcttgatatggaaacgaaaattttgaaatggagaacagtagaatgggcgaatacgataaagtatgtattgaaacatttttaaaagaccagttaaaactttttccggagaaagtagcagagacaccggaagaagcagaagattttctggatatgtgcatggcagctgtatgcaaaaatatgaaagaagtacgggaatattttgacgaaaccggagcagatattgccggcatgagcaaagaagaactggaacaggcagatgaagtgttcaaactgccggacggacgttatctggttgtagatgcctaagaaaacgttaagaggagaacagttgattgaaaaatagaaatatgagaaaaaaagcgggagcgctggcggttgttctggcttgttctgcaatgcttggtgcctgtggaaatccgttggaagcagtcattgcaaagccggtatttaaggttggcagtgagagctgcagcaaggacgatgcaaaagtgatcctgatgaattaccagaaagagtacagtaatttgtacggcatcgacatgtgggagcacgattacggacaggagcagagtctggaagactatatcaaagatctgacactggcgcagatggcacaggtttatacattggatatcatcgcttctgaaaaagaagtgacactttccgaagaagaacagaaaaaagtgacggaagcagcgaaaacgtatctggatggactggatgatgcggaacgtgagtatgttggtgtgaatgagaaacagacagaaaaattattcgaacgttatttgctggcagataagctctatgagtcattgaaaacagatgtaaatcaggaggtcagtgatgatgaagcgcgggtgatgcgtgtaaaacagatttatataacggatcaggcaaaagcgcagtcttatctgacacagcttcagggtggaacggattttgagacactggcgcagactgtcaatgaggcagatgcggtggatataaccgtaaaccgttcgacattttctgatgaaatcattcaaaaattatttgcattgacggatggtggaatcactgacattatcgaggcagacaatggatattatattttttactgcagcagtgcgtttgatgcagagctgacggatgagcataagaaagatgtgttagagcagcgcatgtcagatgcggtgaccgatacgtatgcagattatatgagtcagttaagttccaaagagaatcaggatgtatggtcggaagtaacggtagatacttccctgaaacttgagagcgcatcttttatggaagtatatgcacagtattttgagacagaacaacagtaaacaagcagggaaaagagtagagtgaaaatgaacagatggaaaaaaatagctgctctggccttggcaactggggcagtgctgacaggtgcgatggcgcctgtgtctgcaaatgccgcaactgagacaaaggtgttagagggtgtctgcaaagatccgcagacaaatcagtgtcatttgtatgtgaatggaaaaattgaccgtacagctaataccatcagtaaatatgagaatggctggtggaagattacaaacggtgatgtggattttgattacactggtgtggcgaaaaatgaaaatggctggtggtttgttcgagatggaaaagtagattttaccgcaaatacagtagcgaaaaatgaaaacggctggtggttgatccgagaaggaaaagtagactttactgcaaatacagtagcgaaaaatgaaaacggctggtggctgatccgggaaggaaaagtagattttactgcaaatacagtagcgaaaaatgaaaatggctggtggctgatccgggaaggaaaagtagattttactgcgaatacagtggcaaaaaacgagaatggctggtggctgatccgagaaggagaagtggatttttcagcaaacacagtagcgaaaaatgaaaacggctggtggcgcattgaaggtggaaaagtaaactttgattttactggcgctgcagaaaatgaaaacggaatctggtatttggtggacggaaaagtcgatttttcctataatggaaccgcgcgttggaatggcatagactgccaggtgatcgacggaaaagtgcagtatacagattcgggtgaaaataaagcagattatgtatggccgctgacaggttataaaacaatcagttcttcatttggaagccgtatctgcccgtatcatggtcaggagtttcataatggaattgatattccggcaccatcgggcacatccattcaggcttgtgcagccggaacggtgatcaaagcggaatacagcagcagttttggaaataatatcgaaattgatcacggaaacggcgtacatacaatgtatctgcattgttcttccttgaatgtgaccgtaggacaaaaggtatcacagggagatgtgatcggatatgttggaatgacaggtgatgcaactggaaatcatctggatctcagattcaaagtatctggaacatatgttgatccattaacaatggtgacgccgaaatagcagcattgccaacaccaaaaaataaattacaatgaaaacatgcaaattgagtcatcgaagaaaggtggctcagttttttttgagaaatgtcaaaaaatagaaccctcttatttttcatcaaagcaggcgtcttagcctgcgtgatgcaaaataagaggattccttatattacctataaagttgctcttaaaatttatttatcagccaaaatcatcataacctcattgcttcggttaatgaacgctgtcatagcctccggtgaaagcggctggttggaaagcatagccagatcataaagctgtttacagaacatcggtacatgttcgccatctttgtgatcaagaatatactgaaccagtttgttgttgacatttagaaccaatgtctcattgccgccaaacatggacggatccatgccgtacatattgtacatcttcatcatatcctgcatacgacgtccctcttcggagagtgtgatcatggatgagatagaagcgtctttcaatttttctacttttacatccagattctctttaccaagagcggtgcggaaagtctctgtcagagtatccagtgcagatttcatatcttcctcagatacttcttctttcagtgcatcagttacatcagcatcgatacgcataaatttgtaatgctgattccgctgctctaactgagtgatgaaggaagtatcaatgttgtggtcaaggataacggcgttcatgtcagattccttgaacatacgaatatactgtccctgctgatttttatctgttacatagtagatcgtctcgcgggtatctttgtctgcattagtgttatcagctttatcctcagcattctcatctttggcttctgcctctttttcctctttctcttttaagagctccggaagtgtcatgtatttgtcattgatatccttgaagaggatgtagtcattcatacggtcacagaatttctcatcttttaagcagccaaatttgatgaacgggctgatatcatcccagtatttctcatagctttctttatctgtcttgcacatacctgtgagcttgtcagccactttcttggtgatgtactcggagattttctttacaaatccatcgttttgaagggcgcttctggatacgttcagcggcagatccgggcagtcaatgacaccttttaagagcatcaggaactccggaataacctctttgatgttatctgcgataaatacctggttgttgtacagtttgatggttccttcgatggaatcgtactcggtattgatcttcgggaagtagaggataccttttaagttgaacggataatccatgttcaaatgaatccagaataacggctctttgtaatcatggaatacgttgcggtaaaactctttgtaatcctcatcgctgcactcgtttggatgttttgtccagagcggatgcggatcgttgatcggaaccgggcgttttaagatttttaatttctcggtacgcggagatacttctacgacctctttttcgccgttctcattttctttttcctctgttttagcctcttcaattatggtttcgatcacggtatctttatctgttttttcttccggaagaatggtttcatattccggctcagcagtttcgtttaccagatagatttctgttggcatgaaagagcagtatttgttcagaacctctcttgcgcggtactcgtttgcaaactccagacaatcttcatttaagaataaggtgatctcggtaccaacggttgttttgttaccgtctttcatatcaaattctgtaccgccgtcacattcccagtgaaccggtgtagcgccttctttataagaaagagtatcgatatgaacctcatcagctaccataaatgcggagtagaatccaagtccgaaatgaccgatgatctgatcgtcgttggatttatctttgtatttctcaaggaaatcagttgctccggaaaatgcgatctggttaatatattcctcaacttcatctgcagtcattccaagaccattatcaatgaattttaaggttttctctgtcgggttgacacgtacttccacttttgcttcgtaatcatccggcagtgtgtattcgcccatcatatcaagttttttcagttttgtaatggcgtcacatccgttggatacaagttcacgatagaagatgtcgtggtcggaatacagccattttttgatgatcggaaaaatgttgtcactgttgatggaaagacttccgtgtttgttactcatacttatcactcctgtttcttctttataaatatttttgaaaaattagcgtatttggttcagaaatcctgataaaaaataagggtctctgaaagcataaatacactataatactccaaaattaaaaagtcaatagaaaattagcactctttttaaatgagtgctaacaaaaacaaaaaagtgtaaaaaacattgtgatctgttttacttattgcggtttctgtaaaaaaaaggtatactcactaggatgcaaaaatcaggggtatggttgcgaaaggttgtaacggtatttcctgatgataatgaagtaagagttgtgattatattatgttatttttatagaaggaacaggagtgaacagacatagcaggagagagaaattatcattttgataatataaaagctttgttgatttttctggtagtattcgggcacatgatcagtacctttgcggatacgccggaagtagatgttatttataaaatcatattcagttttcatatgccggcgttcatatttgtatccggttattttgcgaaagttgatccgaagaagattttatccaggatttttccgctgtacatcgtatttcagctgcttcgttttttgctggatttcatattggacagcattcaatggggacatccggtgaaaatcgatatgcagttttttacaccgcgctggacactgtggtatctggtggcgatgatcatttatcagcttttgttgccggtatttgacacgaaaaataagcggcaccgggtggcatatttgcttttatctatggtgcttggtattgtgatcggttacaatccggatacggaaaactttatggcaatgtccagaattatgaacttcctgccatttttcctggcgggatattacgaaaaagacggtggatttttccttcgatatggaaaacagagaaatccgaaagaggcaaaaattgcaacagcgtttctggcggttggaatcattgcgggatttattctgatcagcagactgagtacaagaaaattgttctggggaacggagagttttgatggggatgtatatacctggtatacacgaatcctggcatggattatcgcatttttatggatttggattttgattgtatgggtgccgacgagacggattcctgtgattgaaaccatcggaaaaaatacactgagtgtttatctgttacatacaatcgtaattctgattctgatgtatacgccgtttaatgactgggtatttaataaaattggctggcagctgctgatttcggtgggactgacactgggactttcctggaatggatttgaacgcctgctgcgaaagattgcgattccgtattatgggaatcggaagaagtaagtgtaattcgattacagaaaaagaaattatgaaatatgatcctacagaaacgtggattgtatgtacttgcgaattataattcagaatatataagagaaagaatgataaacagactcacgaataacttgcaaattaggagcgcgaatatgcaatatcgatatgacaaagaaaaaaatccagtttccatgcttgcttttggctgcatgcgttttacaaaagaaaacggaaaaattaatctggaaaaagcggaagctgagattttggaagcgatgaaacttggtgtcaactattttgatacagcctacatttatagtggcagcgaagaagccatgggaaagatttttgaaaaaaatcactgccgggagcagatttacattgcagataaactgccgcattatctgatcaagtcagcagcaggtctggaaaagacgtttcaggagcagctgcgcagattacggacgacttacatcgatttttatctgatgcatatgctgacgaatctggaaacatgggaaaaattaaaaggccttggcattgaagaatggattgcaaagaagaaagcgtccggagagatcctccggattggattttcttatcatggaaatacaaaggatttttgtgaattggtggatgcttatgactgggatttttgtatgatccaatacaattatctggacgaaaacagtcaggctggacggaagggtttgcaatatgctgcggcaaagggacttccagtaatgatcatggaaccgttgcggggaggcaaactggtaaacctgttgcctgaagaagcaaaacggaaggtggcagcacattcatccggacgcagtgcagcagaatgggcatttcgctggctctggaatcagccggaagtcacaacggtactttccggcatgaattctattgagatgatacgggagaactgtcggatcgcatctgagacgcaggcaggggcatttacggaagatgaggttgcttttgtcaatgaattaaggcatgccatcaaccacagcatgaaagtaggctgtaccggctgcggttattgtatgccatgtccgaaaaacgtggatatcccgggtacattcagtttttataatctgatctacagtgaaaataaaaagacggcccgaaagggatatatgcagtgtacgatttttcgtcagacaccgaccagtgcatcccagtgcgtgggctgcggaaaatgtgaacagcactgtccgcaggggattcctattcgcaaagaactgaaaaatgcttcaaaagaactggaaaatgtgacgtataagcttgcagggaaagcgatacgattgtttaagttgtggtaatgcgaaggggattatagataaacagaagttatagcataaaaaagatatgtagctcttttatggaacatgtattacatgaaagagttatatatctttttttgtgccaatttttttatggatgtaaataatgagttcttatactaaaagaacgtcgacgcccgcatctttcagtaatctgatattttccggacttacatcgtcgttagtgataacatgatgaatatcttctatcttcattactttgtcgataaaaggacgtacgttaaatttgctggaatcgaccagaacatagcggtcagctccacatttagagacacaggtttctgttctggggtcaaaatcaatagaagaggttccgatttttgcattaatggaatcagcgctgcagtaggatttgtccacggtcaattctttgaagaaacgctcggctgataatccccgacaggaactgttacgtttcatgatccatccgccagcaatataaagcgtgattccctcttcgtgcaaaagttcatttgctacaggaaaagaatctgtcacaatggtgagatcctgacggttatggagcaacgttgccagcagataggtagttgttccgcttccaatagcaatgtaatctccatcttgaattgtagcagcagcgcgtgttgcaacttttaatttggcttcataattttcaatctcagaaaaatctctgtttggtttcgtctgttccggaatatctacaggaattgctccgccatgagtacgctggagcagacctttttcctgcatactttgaagcagaaggcgtgcggtggagggggcaatagataaaatatcgcatacctctgtaacacggatttttccctgtcgctttaacacgtctaaaataatatcatctctttcctccgggaaagattcagttatttgttttgccataatataatttcctttaattcttttttgtagataaacaatttaaatcaaagttattatagcaataaaacgctaaaaaaacaagtgaaaaaaatctaatataacataaaacgattatataaatcatcgatatgcacaaaaaacggatgataaaatcatataaaacgctaaaaaagataaaaacaacaaaaaacgattgcacaaacgatgaaaaacgattacaatacaggcataacaacaacagaacgacagcaaatgtcacaaaaagtaggaggaaagcatatgagtccagagataatcatcatgttgacaaacaatgacattaccgtatcaaacgcggaagaagtttttgaaagctgcaaagatcttccggcaaaaaaatgggggtttaaagatgttggacttccaaaagatgagatgatccggcttgcgaaaaaaatgaaagaggcaggaaaagaaacgtacattgaagtagttacttatacagaagagggatgtctggaaggcgcaaaacttgcctatgagtgtggatttgattatctgacaggagcgttaccttttgattccgttttccagtatgcgaaagaacatcatctgaaatattctccgttctgtggaacagtaggtggcagtccggtagctctttcaggaaccatggatgaaattgttgcttctgcaaaagcatgtattgaaaaaggggcagatggcgtagatcttacttcttaccgatatgtagatggagatccggtagttcttacaaaagcagttgttgatgcagttggtgctgataaagtatgcattgcaggtagtattggaaatgtggaacgtatggatgaaatgaaaaaagcaggcgttgcagagtacacgatgggaagtgccctttttaatgcaaactttgtaaaaggtggaacatttagagaaaatctggaatttgttcttgattatttaaataaataaaatgagtatcaataaattatattttaaaaagtaaaggagaaaaaaagatgttagaaaaatttgcacatgtatttccggctatggttacaccaatgaatgaggatggaagctttaattatgaagtggctaagaaacatgctgactggatgatggataatggaatcgggggaatcggagttctgatggcagcaggagaataccagagtatttcactggaggaacatatggaatatgtaaatactatggttccatatatcaaaaaacgtggagcatctgtgattgtaggttgttccagagaacgtgtagaagatgcatgtgcattgatgaataatgcttataaagctggcgcagatgcagctatggttcttccttctttttactataatcagtcacaggaggaaattatagatcattatacctatttaaatgatcactctgatctggatatcatggtttacaacaatccgaatgtaacatccggaattacgcgtgaaacaatgaaagaactttataaacttccgcatgtaaaaatcgtaaaagatgcttctatggtgattgatattatgacagatttcatctttgaagcagaacaggccgaggaagagaaaaatgttctttgtggatgtgattatttattgtatcaggcttatgcaacaggtgcaatcggatggatcagtatgacagctaatattctgccaaaattatctgcagattttcataatgcgatgattgtggagaaagattatcagaaaggtctggaaatctataagaagctttatccggttgtaaatatgacagagcggttcccggcaccgacacaggctgtaaaacacattctttctgaagtgatcggatttgatgagggaatttgccgtcgtccacgtcgtgatatcagtgatgcagataaagagctggttgttgaatggagtcagatcagagaactggctaagacaaataaaatgtaattttgtgagagcagcaaggagggggttctggtgaaacagacagattatttgattattggtgccggcattgtaggctgcagtgcagcttatctgttgacaaaagaaggaaaaaaagtaacagttgtcgataaaagttacccttgcaatgaagcttcaggggtaaatgctggaggaatggagctcctccagcaacctcctcaatctttgccattacatattctggcagcagagctgtgggacatgtttcagaatcaggatggaattgattgtggctatcatcgtacaggaggtctttactgtgtattaagagaagaagatttgccgatgcttgatgcacaggaggaacgctttaagaaaaacaatttgccgatagaacgtttgaataaagcacaggttaaagaaaaaatcccatatattggtgatgaagtaatcgctgcgaatttcagtccgatgtccggatattctaatccgcttaaggcaggggttgcaattcttctgaaagcaaaaagtatgggatgtgagttttatgaccatcagtttattaaaaaaatcgagccggatccggatggggaaggatatattgcatattcagattcagaacagttttgtgcaaaaaaaattctgatcacaggtggtatccgttcaccgtggctgctggagcagatgggagttcatattgaattggaagaaaaacataatatgatcactgttacagaaaaagcaccgcactttattgattataccattacaacgccaactatgaccatgaagcagacggcagaaggttctattttgatcggtggtggtcgtgaaggatatggagatcttaatacgaatgataagaaaaaagatgtttccatcaatggcctttgctttaatgtacgggaagctaaaaatattattccgtccattcagaaattgaacattttgcgtagctggtctggttttgagggatttaccccagaacgtcttccatatattggagaagtggaaaaataccatggtatttattatgcagtaacgggattctgtggctattgcattggcccgggtgtggctgctcatgccattaaatgtatgaatggggaagcatattttgatgtgaatttaattaagggggaagaatcatgtccagaatagagaatcacattattttgggagagatggaagagaaaaaaatggttacgattgttgtggatggcaagaagattccggcagtagaaggagaacctattctttctgcacttctggcaagtgacattaaagtagcaaatatcagtccaaaacatcatgaacccagaggatatttttgcggaattggccgttgtacgaactgtgttatgacagtaaatggtgatcccaatgtacggacatgtgtaacaccggttgaggaaggaatgattgttgaaacgcagaatggtcttggaacgtgggaggaagcataatgaataaagaagtagaaattctcattattggtgcaggaccggcaggactttcagcggcgattgaagcagcaaaatatggtgcgaaagtactcgtagtcgacgaaaataataaacctggcggacagttatttaaacagattcataagttttttggatccagaagacataaagcaggtgttcgcggcgttgatattggaacagaacttctggaggaagttgaaaaattaggcgtggaagttatgcttaatacggtggcatatggattttacccaaatggcgaaggtgttgcactggcggtaaacggtgaaaaaggtatgattgtttccccgaaaaaaatcatcatggcaaccggagcgggagaaaatccactggcgtttccgggatggacgttaccaggtgtcgtaggtgctggtgcgattcagaccatgattaatgtacatagagtatctgttggaaaaagggtgcttatgattggatccggaaatgtaggcttgatcgtcacttatcagctgctgcaggcaggaatagatgttgcaggaattgtagaagctgctccttctcttggtggatatgcagtgcatgcaggtaaagtacgaagagcaggtgttccattatatgtaggacatacaattttggaagccgttccgaatgaggatatgtctggtgtaaaaggagcgattatcgcagaagttgacagctcatttcaaccaattcctggcacagagcagtttattgaatgcgatgtcattggcattgcagtaggtcttacaccagatattggattgccttctatggcagatgtgacattggttaatgccggacgacttggagctcaggttccgatgcatgacagaaacatggagacgacaaaagatggagtttatgttgccggggattcagccggcgtagaagaagcatcttcagcgattgaggaaggaaagcttgcaggaatagcagcagccgagagccttggaaaaatagatgcggaaacagcgaaaatggcgaaagacaatgtatggaattcgttgaatcagctcagaacaggaccatttggtgcggggcgttacactgcgaaagaagaaatcattcagcacatggaagaatggaaggtgaaaaataatgcttgctagagacggatttttagatatagaagaggttgtaaatattccgggatttccgggaacggaaacgttaaataataaaaaatgcgtagtaattgaatgtaaacagaacatcccatgtaatccatgtgaaagtgcatgtcctcatcaggcgattactgttggaaatccaattaccaatcttccggtggtggatccggaaaaatgtattggatgtggtctgtgtgtggcacaatgtcctggacaggcatgttttttggtggatatgtctcaaaaagagtacgatacagttaccattccatatgaatattatccgttacctcagaaaggtcaggatgtttatggtctgggaagagatggaaaatatcttgtaaaagcagaagttcttcgggtaatcatgacaaaggtgaatgaccgtaccgctgtgatagaagtaaaagttccaaaaggatatggcatgaaagtacgaaatatttctgtggatggaaaaaggattgcgtcagaagaagatcctgtattagaaaaaggaatgctggataatattgatgacaatgaaatgtatgtgtgccgttgtgaggaaattacaaaagcagaagtaatagcagctgtgcgtgcgggagcaaccagtgtgaatgaagtaaaacgtctgctcagaacgggtatgggactctgccagggaagaaactgtgctaagacgattgaacggattattgcagcggaactaggtgtgtcaccggctaaggtaccgcaggcaacaaagcgaggaccggtaagacctataaaattgacaggctatacatctcttgatattgaggcgcaggaagaaatgtttgaacatgattggtagtactcgtttaccggcaatggtattttcaggttgagagatcctttggtgtaaaaaaattgaaaatgccgttataaaatagtatcaatttcaagagagattagtatatgatataagtggaggggttcctccacttatatcataatcatagcaaaggaatctttgcaggaaaatgatttgaacgcataagaggcagagggaggggtttttatctgcttggctgaaaaaggagaaaataatgagtaatttttttgtcacgttagataatattatctggtcaaatccgattatatttctaattttgggttcagcagttttttttacaattattttaaagggagtacaggttcgcaatatcgggcatcaggtgaaattattatttggagcgagtgattctgaagctggtatttcaccgtttgctacattttgtaccgtcattggttaccgggttggaacagcaaatgttgccggcgtcgcagtagctattttctttggcggtcctggtgcagttttctggatgctggttacatcactcctggatacagcaatttcttatgcagaatgttctctgggacaatgttataagattaagcaggatggagagtatcgcggaggcgcttattattatattgaaagaggattaaaatgcaaaccgcttgcaattatttatgcaattttaacgtttatttgtgtaccgatactgacggtggcaccacatgcgttttctattaccagtggatttaaaaacagtttgcatatttcgcaatatatcacaggcgcaattatagcggtgttactgtttattgttatttccggaggcattaagcgtattgctaaaacggcagagctgattgtaccgtttatgaccattggatttattattatgacagtggttgttatgattatgagaattcaggaagtaccggcggcactgggactgattgtttcaagtgcatttggagcacatgcaatattcggaggattactgggaacggcagttctctggggggtaaagagatctgttaattcttcgggagcaggaatgggagaagctgtacctgcagcatctgcaacagaatgttctcatccgggagtacagggcctggtaaattcattttcggtatatattgacttatttgtgtgcatttgtaccgcattgattattattttgacagattgttttaatattcaggatgcatcaggaactctggtttatatatcacagggatctgaaaatgtagcaacaggtgtggccgatgtaggcattgcatggacacaggaagctttaaacataatttttccgggtagcataggaggcgtgctactttcattcttcctttttttctttgcttttacaacattacttaactattactatcagggagaaactgcaatcgcatatattcttggaaaaaaaactcaaaagacaagaaaggtcgctatctggatattaagagttgtaatgccgtgtatcttcttttattttggaatacagacagcatctaccagttttgcgtctggagaagttggagtaggactcatggtctggtttaacgtaatagtactcctgcttatgtcgccaacgattaaaaagattcatgatgattatgtaaaacagagaaaagccggtgtggaaaaaccggtgtttaatcccaaaaaactggaaattaaaaatgcggatctgtggatggaaatcaatgcagacaagatttcagaagaagaaaaataaaagtgttttatatcagattggaaaagaagtgagactatgaaatatattttaggtatagacattggaacgacagctatcaaaggcgctgtaattggcgaagacgggaaaatttatggcacacaaaccagtgaatattcccttaccactctttctacaggagaagtggaagctgatctgcagctatatatagatgcctttacgaagtctgtcaaaggtgccattacagatgctggggtggatacagacaaaatcacctgtgtcggattctcctctactgcagaaacatgtgtctttctggatgaaagaaatgagccgctttgtaaagtgattgcatggatggatacaagggcgaccagggaagctgagtatctgacagaacattttgaaaagaaggatattattcaaaaagttggatttgatggtatttatgcgattcatccggtgagtaaaatactggcagtaaagaataaaacaccggatatttttgaaaataccagaatgtttgcgcagattaaggactattttgtctatcggcttaccggtgagtattatacagatgattctacagccagtgatcatggattttatgacatccggaatcgatgttattggacagaaatgttggattttgtaggaatcagagaagagtatttgccgaaaatcgtaccgccgggaacggagatcggaacgatttccagtcaggctgcaatggagtttggattgaatcccaatacaaaaattaatgttggggcttttgatcaggggtgcggggcaattggagctggaaatataagaccaggcattgcgtcggaaagctcgggatcagctttggttacggttacgacaattgatacattaaatcctgatgcaacaggggatgtaccgacattatgcagtgcaattccgggaaaatatatgtatcagccatattgtaccggttccatcattatgaaatggtatcgcgatacattctgcgaaaaggaaaaaatgatagagaaacagactggtgttaatgcatatacgcagatggatgaactggtaatgtctacacgtcctggggcagatggtttgattatgctgccatattttcagggatccggagtaccggaattgaatgaaaacgcgcagggggtatactttggcatcactgcgactcatacaaggggacattttatcagagctattatggaaggtctggcaattgccttgaggcgtatgttggaatgtgaacaaaaattaggggcagagatgacagaaatacgctccttagggggtggatcaaaatccaaagcatggtgtcagatcaaagcggatattcttgggataccggtaaaagttatcgataacagcgaaagtactgcatgtatgggatgtgccattcttgccggggtggcaaatggtatatggaattctgtggaagaagctgcggaacagtttgtttcaataaaagaaacctatgaaccaaatcctgataacagggaattatatgaaaaagtatacaatcaatatgtggaagttacaaaagcattaaatcctgtttttaaatagaattataataaaattattagcatacccattttaaaaaccttattatattttcacaaaaatcagaaaggaggaaaccgatataaaatagaaggattcagtatctttgttgtatttatttcaaagaaactgagtgtacacaaactggaaaagcggttaaatttcctggacaatgttatgtttgtccgagaaaatttaaccgctttttagtttccttaaaatattttaagaaaattcatatgtgtaattgtgctatttggagccctgctgttttttcaagtttttctgagcagttgacagcatcagtttgatacggttcagctggtttacttcgctggcacccggatcaaagtcgatagccacgatattggacatcggatactgatggcgcagttctttgataacacctttacctacaatgtggtttggcaggcaggcaaacggctgacagcatacaatgttgttgacaccggagttgatcagctccaccatctcgccggtcaggaaccatccctcaccggtctggttaccgtgagatacaatggattctgcattttttgcagtctcgtaaatatttgccggcggtgtgaaatgcttactttcttccaatgctttatgcgcaactccacgcagtttttcaattgcccagataccaagatttgattttgtcttggtagatttcttgaatccaaggacgtctgtcttgaagttgttgttgtagaagcagtagaggaagaagtccagcagatccggaatgactgcctcagcaccttcagattccagcagatcagcaaggtagttatttgccattggcataaatttaaccagaatctctcctacgatacctacctttggtttctgaatatcaagtcttgggagtacatcaaaatcatgcaccatctcacgacagtactgtttatactttttatgactgacgagcttatcggtagatacaaagtctgtaattttctgtacccattttttgtgcagttcgtttgtggaacccggaactgcttcatacggtctggttgcgtagatacagcgcatcaggatatcaccgaataccagacagtacatacctttctggatcagagaggcattcagcttaaatcccgggttggattccagactgctcaggttcagtgaaataaccggaatctgcggatatccggctttttccagtgcacgacggatgaatccgacatagttggaagcacggcagccgccaccggtctgtgacatgatgatggccagatggtctacatcatatttgccggaagttactgcatccatgaacataccaacggtgatcagggacggatagcaggcgtcattgtttacatattttaatcctgcatcgacagcagctttgttgtcatttccgagaacgaccaagttgtaaccggaagccttaaatgcaggctctaacagttcaaaatggatcggagccatctgcggagcaaggattgtatatgtctttctcatttcttctgtaaagacggcacgctggtagctggaaggaacaatcttgcgctctttcggatttttctctctggtgcggatggcagcgatgagagaacggatacggatacgtgcagcgccaaggttgtttacctcatcaatcttcaggcaggtgtaaatcttgccggaatgagtcaggatatcgctgacctgatcggtggtaacagcatccagtccacaaccgaaagaattcaactggatcagatccaaaaagtcggtcgtttttacataatttgcagctgcatacagtctggagtggtacatccactggtcaagtacgatcagcgggcgttctacctgatgcagatgggagatggaatcttcggtcagaactgcaaatccgtaggatgtaatcagttccggaataccgtggttgatctccgggtcaatatgatatggacggccggcaagtacgataccgcggcgtttgttgtcttttaaccactggatggtttcttcgccttttttgcgcatatcgttacgggcgtttgcaagttcctgccatgcaacgtgtacagcagcttttacttcagaagccggaatatcaaaatcttctttcatgatttcttcgagacgttttgttaaagtttcctcatctgcgaatgacatgaatggattgtataactttacttttccggatgtaatgtcatctacgttgtttttgatattttctgcataagaagtaacaatcgggcagttgtagttgttgcctgcatccgggaactctttacgttcataaggaatacatgggtaaaagatggagtcgatgccctctttgatcagccatgtaatatgtccgtgggcaagttttgccggataacactcggactcactcggaatggactcaataccaagttcgtaaatctttctggtagaagccggagagagtacgagacggaatttcagtgctttgaaaaatgttgcccagaacggatagttttcgtaaatgttcaggactcttggcataccgagagttccgcgggttgcttcttcctcactcagaggttcgtagtcaaagatacgatgcagcttatattcaaacaggtttgggatctgttctttgtttttctctttaccgatacctttctcacatctgtttccggtaatgtactgacggtttccggagaatttgttgatggtgagcaggcagttgttggtacatccgccacagcgggccagttttgtttcaaatttcagatcgttgatctggtcaatggacagcatggttgtctctttgccttcgtaacggtcgcgggcaatcagtgcggcaccgaatgcacccatgataccggcaatgtccgggcggattgctttgcatccggaaattgtctcaaagcttcgcagtacagcgtcattgtagaaggtaccaccctgaacaacaatgttctgaccaagttctgtcggatcggacagcttgattactttaaataatgcatttttgataacagagtaagccagacctgcggaaatatcagcaacagatgcgccttctttctgtgcctgttttactttggagttcataaatacggtacaacgtgttccaaggtcgatcgggtttttcgcaaataatgcttcttttgcgaaatcctgtacggaatagttcagagattttgcaaaagtttcgatgaaagaaccacaaccggaggaacatgcctcatttaactgtacgctgtcaacggtgttatttttgatcttgatacatttcatatcctgaccaccgatatcgaggatacagtcaaccttcggatcaaagaaagcagcagcggtgtagtgagcaacggtctctacttcaccttcatccagcatcagagcagcttttaccagtgcctcgccgtaaccggtggagcaggaagatacgatgtgcgcatctgccggaagctgttcgtaaatctctttgatagcaataatggaagtggccagcgggcttccgttgttgctgctgtagaaggagtacagcaaggtaccgtcttcgccaaccagagcaacttttgttgtagtggaacctgcatcaattccaagatagcagttaccactgtatgtagaaatatcgcctttttttacacatgcgccattgtggcgagcagtgaattcgtcgtaagcggcctgatctgcaaacagcggatccatacgttctacttcgaattccatgtggatctcaccttttaatttgccaagaagatcttctaaggatacctgattttcttccttgtaatttaaagcagaaccgatagctgcaaaaaggtgggagttttcaggaacgattgtatgctcctcatccagtttcagtgtgcggataaatgcttctttcagttcggataagaaatgaagcggaccgccaaggaatgcaacgtgaccacggatcggtttaccacaggcaagaccactgatggtctggtttacgactgcctgaaaaatagaagcagacaggtcttcacgggttgcaccttcgttgatcaacggctgaatatctgtttttgcaaatacaccacaacgggcagcaatcgggtagattgctttataatttttcgcatattcgttcagaccgctggcatctgtctggatcagggaagccatctggtcgataaaggaaccagtaccgccggcacagataccgttcattcgctgctcaacattgccgccttcaaaataaatgatcttggcatcctcaccaccaagctcgatggctacgtctgtctgtggagctgcgtcctgcagagcggtagatacggcgataacctcctgtacgaaaggtacaccgaggtgttttgccagtgtcagaccaccggaaccggtgatcataggacagagctggatctgtccgagtttttcatatgctttatgaagcagatcggtgagcgtttcgcggatatttgcgaagtggcgctcataatcggaaaaaactaacgtattctgctcatccaaaattgcaatctttaccgtagttgatccgatatcaattccaagtttgtgtaatttaaaattatccattttaccacctatatatgttgattggttgtctgaaatcgttgattttcagtaaaaacggatttcagaagtttcatattatatgtataacacctgtcagattacaagcgaacttcattatacgacaggaaatagcaaaatacaatctttttataatattttaacaaattgagaagggttcctatttaaagcccgaaaccaataaaataagcggtgcaattttaagaaaaacgcatattctaaaagaaaaaggaaatcgttatgaatccttatttcgaatccgaatatggagaatcccgcatgatgcacggctgcccgggactgattcatgtggtaaaagagggggatactttatataaaatttcgcagtatcatcatgtgagtgtgacagatatattgctggcaaatccgtatgtgaacgtatataatctgcagatcggagacgaattgtgcattccggttggaaaaaagatcatgcgggatgaagcataagtagtagatgtgtatggtagcaaggtgctcgatttacctgtcagagtgtgacgaagtttgtgttgtctgtatgttccaagaacaaacaatgggatgatgaaaaatggctgtggcaggtgaatcggacaccaaaatttcaaagtttgccaagttgacaaagtgatagtcgctctatataatcaaaagatagccatctttttctcgcaaatatttgtatggaacgcttgcgaaaggcaaatgaatcagcgaaaaaagtgctaaaaataaaacgaaagtaggaaacagaatgcattttctaaataaaatggaacgaaagtttggcagatttgccattcagggactgatgaaatacatcattcttttctatgtggcaggatatctgattcagtttctggcaccgcaggcatacagcttcctgacattggagccgtttatgattttccattacggacaggtttggcgactggtgtcctgggtattgattccaccaccaaccggaaatatcatttttatgctgatcatggtagtgctttattatcagcttggtacagcattggagaatacctggggagcattccgatttaatgtatatatttttggtggtatgatttttaccgtgcttggtgcgcttctcctgtttgtaatttatggtgtgaatacacctgtttcaatgggatccagcttcagcacatattacattaacatgacaattttcctcgcatttgcgatgtgttatccggatatgcgaatcatgctctggttcattatcccaattaaaatgaaatggatggcaggtttttatgcagcactgatcatttacagtatgattatttcaagctggggaggcagagttgctattatcgcatctattctgaatttcctgattttctttttcagtacacgcaactatcgcagtgtatcgccaaaagaagtacacaggaagcggacgtatcaccgtcaggtacagcaaccgaaaggtgtcacacgccacaaatgtgcgatttgtggacggacagaactggatgatccgaatctggagttccgtttttgttccaaatgcaatggaaattatgaatattgtcaggatcatctgtttacccatgaacatgtaaaataatagatgcatttcatttcctggtaaaaatactaaatgaaatgctagcttaagtagtttaagggcagttttgtgggaattatgacagataagattcttacttaaaatacaggagagagaggtttgattatggaaaatgaagcaatttccagaaattttattgagcagattattgacaaggacatagaggagggcagatgtgagaccgtatgtacccgttttccaccggaaccgaacggatatcttcacatcggacatgcaaaatctatccttttaaactatggacttgctcaggaatatcatggaaaattcaacatgcgttttgatgataccaacccgacaaaagaaaaagtagagtttgttgagtccatcaaagcagatattgagtggctgggcgccgactgggaggacagactgttctttgcatccgattattttgaccagatgtatgaagctgccgtaaaactcatcaaaaaaggaaaagcgttcgtctgcgatctgtctgcagaggagatccgtgagtaccgcggaactctgacagagccgggtaaaaacagcccataccgtgaccgtagtgtagaagaaaacctggaattatttgaaaatatgaaaaatggcatgtatcaggatggagagaaagttctgcgtgcaaaaatcgatatggcttccccgaacatcaacatgcgtgatccggtcatctatcgtgtagctcatatgacacatcatcgtaccggagacaaatggtgcatctacccgatgtatgacttcgctcatccgatcgaggatgccatcgagggcgttactcattctatctgtactctggagtttgaggatcatcgtccgctgtatgactgggtagtaagagagctggagtatccgcatccaccaaaacagatcgagtttgcaaaactgtatctgaccaacgtggtaaccggaaaacgttatatcaaaaaattggttgaagatggcattgtagacggatgggatgatccgcgtctggtttccatcgcagcactgagaagaagaggatttacaccgtcttccatcaaaaaattcgtagagctgtgtggtatttccaagagtaacagttccgtagattatgcaatgcttgagtactgtatccgtgaggatctgaaattaaaagcttcccgtgctatggcagtacttgatccgatcaaactggtaattgataactatccggaagggcagaccgaggaactggaagtagataacaacatggaaaatccggagcttggcaaacgtgtcgttccgtttggccgtgaggtttatattgagcgtgaggacttcatggaagaaccaccgaaaaaatatcgtcgtttgtatccgggcaacgaagttcgtctgatgaacgcatattttgtaacctgtactggatttgagaaagacgaagatggaaaagtgacagtagtacattgtacttatgatccggagagccgcggaggaaacagcccggacggaagaaaagtacgtggaactatccactgggtatcagcagcagatgcagtaaaagcacaggttcgtctgtatgagaatatcattgacgaggagaaaggtgtatacaatgaggacggaagtctgaatctgaacccgaattctctcactgtactggataactgctatgtggagccatctttactgaaagcagaaaaatacgacagcttccagtttgtaagaaatggtttcttctgtgtagatgcaaaagattctacatcggagcatccggtattcaaccgtatcgtatccttaaagagctcatacaaactgccgacacaggcttaggagaaaatgaaagaattagcgattacgcttgatacagaaaaaaaacagcctttatatgaacaaatttacgaagccctgcgggaagcaatcttgcagggccgtattttacagggggaaaaactgccttctacccggtttgaggcggattatctgcaggtgagccgcagtacggtagagcttgcctatgatcagctggtttccgagggttatatacatgcagaaccgtatcgcggttattttgcctgcgatgtgcgggaactgtatgatctgacagatattcatacagcagatacacagagccagagtatattgacagaaatcagatctgaaatagccgctgagaaggatcaaaaggaaacctatcggattgatttttcactgaatgcgttggcattggagagttttccatataatggcttaagtaaaattatgaaaaatctgcttctggacgaaggggaacagatcatgagcagcggaagtgctttcggagaggcaaatctcaaagagaccatttgtgactatctgtttcatgcgcgaaacgtccggtgtgtgccggaacagatcgtgatcggagccggaaatgaatatttgcagcttttactggcgcagatgcttggaaaagaacattgtgtagcaatggaatcccctacatatctgagggcatacaaaactttccggaatattggtttcccggtgcaggaagtagcattggatgagtccggaatgcgggtggatctgttgcgggaaacagatgccagcattgcctatgtgatgccatcgcatcagttcccacttggaatcgtcatgccgatgaaacgcagactggaactgttaaactgggcgatggaagaaccggaacgctatattatcgaagatgattatgacagtgagttccgctataagggaaaaccgattccggctttgcaggggattgatcgttttggacgtgtgatctatctgggaaccttttctaaaagtgtggcaccttctacccgtatcagttatatggtgcttccaaaacagttgttatccagatttcgggaatgttgcggattttatgcctgtaccgtgccgaatctgatgcagcaggcaatctgtcagtttatgaaagcgggatattttgaaaaaaatctcaaccgtatgcgtgcgatttataaggcaaaacatgattttatgctggcagaattgcgtaagtatccatgggtgttaaatatcatgggggaaaactccggcttgcatctgttagtggaagttggcacgacactgacagagcagggtgtgattcagaaatgcgcagagcagaaaattcgtgtgtacggattgtcagagtattacatcagtcagaatccgaagcgggagtatccgattttgcttctgggatatggcgggctgacagaggaacagattgcagatggattgcagatgattgatggggttttggcggaaatggcgtgtcagactctgtgaatctattgaatgcaagtttgggtaaaaaatgaataagtaaaggaaagcagctcttatgtcgcgtgacataggagctgtttttctatgcttaaattgagaaaatttcaaaaaaattttcagagtacataaagaatacagattgattttatataataaaaacaagaaagaaagacatgaaacagaagtgtagagtgcagtgattccgagaagaatatgtcagcttacgctgaccagaatcacgcgccaagtctcacgtgagttcgacttgaataatatatacggagagtcacttaccaaaaaatatatctgaacggaaaatttgggggtgagatgttatgatgcgaaacatacggatagaagtacagaaaattttacatttgccatatttattacttggtgtggcaggaattattgctttgtgtctgactgcaacgggagacatgaacgttggcggcagtcagatatctattttttcattgctgataagaccagaagttactaacactccgcatactgcatttgaattgtggcgggcaggcatcggaggctggctgaccgtatttgcaccgatgcttctgacattgggatatatgatctcactgtccggggaaaggcagaatggtcagatccgatttgcgctgatgagatccggaaaattgcgatattgtatttccaaggtttgcggtggagcgttggctggaggaattattttcctgatcggttatgcggtgttcgggttgcttatggtgattcgttttccatcgttaaatacgctgccagtgaaagaacaggagttttatctgatgggaagcacgcttgcggcggaagttgtgaaacgtctgattggagcattcctttatggtatgatgggcagcctgtttggaattggtgtggcaattgcttttcgggataaatacatgctgatctgtttgccgtttatgatcaattatatttatcagcaggtacttggaaaactggcgtcagattgtatggtggcagaaaaatatgaaaaaattacatggatcgaggctgtgagaccagaatcgattatgaatatatcgagaagtgtgacctggttgattccgtttgtggtgatgttggtcatttatctagtattaattggtgtattttatctcagtatgaagttaagtacagtttagtgatggaatatttgtaaaaatacaatgtgatttgaggtgaatttatctcagtcgagaagactcccacttctgcaagtggtgagtaataacaagtctttctcagtgggagtacaatctccgactgagataaacgctccgcgggggcgcacattgtctgggagacaatggttttgcgccgaccggaacgaagtgtagatgtgcagtgattctgagaagaatatgtcagctttcgctgaccagaatcacgcaccaagtctcacgtttgttcgacttgaattttggtacaaatagtttcaagcgaggatgaacaggaattagtaaacgcaaaaaaataaaatgatttggggaggagcaaaaacgatgatcgaggttaaaaatatttctctggctttgaataaacgacagattttaaacaacgtttcactgaccttaaaggaaggcaacatttatggtctggtaggaaataacggcagcggaaaaacaatgctgatgaagtgcatgtgtggatttatccgcccaacggaaggtacggtggaatccaacggaaaagtgatcggacgggatgtggattatttaccggatgctggagtgatcatcgaaacaccgggatttattccctattacagcggctttcagaacttgaaagtgcttgccggaatcaaaaacaagatttctgcaaaggaaatccgggaagcaatacagacagtcgggctggatccggatctgaaacttccggtgaaaaaatacagtcttggaatgcggcagagactgggactggcgcaggcaatcatggaaaatccgtcggtattgatcctggacgagccgatgaacggattggataagaacggggtggaagaaattcgaaagctgttgctattcatgaaagatgagcgcaagatcattgtgattgccagtcacaatgcagaagacattcgtgtactttgtgatgaagtacatgagatggaacagggagagttaatttaagcatatgttgattcagagagaataacgtaaatgaaagagaatgctgaaaacatgatttaggagaagtcgatatgtatgtggggagggaattactatgacagaaaaaggtacgattaaacagacattattaggtgggctgaccgtaggattactccttttattatttgtattatgtggatgtggaaatacgaaaagtcagcaggaagacaagaaccagcggtcacagagcgcagagacgaaaaaaataaatttttctgaggaaaagtatgaggaaaaaatcgtagacaacagaattgctatagcagaatatccaaatcactatgagcaggaaatacaggagattcaggacttatcctatccgaacattcattttacagaggattgtacatttgatccatttccagaagaactttcgagattatctgtattttatacgacagcacatggaatgtctgtgcaggaagggcttgagacattagaaaactggctggtaagcatcggaaaacaggaagagattgatctggaaaaagaagtacgtgtcataggagctgatttagaaatggatgaaagtaaaggtgcaccggaatgttatcctttattgtcagatgtttcaatcgaacagttaggaagtggagatgcgttacttctggatacgaaacagtgctacgctatggttggcgtagaggggatttttatgatgagcgatggaaaactcagtgcgtatcttggagaaaacccgaaaccaatcaacgatatttatctgaaatatgatcttaaactgcttcagtcaggaaacctggaggagctaaaagaagaagtctatcctctcatttccggagactataagattggggaaagtgcaaaacaggtaaaagaatattttgaaaaagggacaccatttccaatggcagaaggagtaaaaattgacattccggatgtaagtgtgtatcgcttggaggctgatacctgcatgtatacttttaatgtcagaagatggtttgaaaatatgccttacctgtatctgcaggataccgatattgcaaattcttatgaaggctatgcaattgaggagtcgatgaaatatgtcaatgtcgttgatgatacaggcgtatctacatttaaaggaccgtcagagtctgatgtggttcacccgttgtatcaggatacacagatggttggagtggaacaggcgtttgatattgcaagcaaaaaactggcatcctttttgaaactggaagtgcaggaagtaaaaattggttatgcaagttatatgacggacactggtcagggatttaatgaagatacggcagtttattatccgttctggaaattcagcggggtaaatactgtgaaaaatcaggtgttgaatgtctatgtcgatatgatttcaggggcggtgtattatacgtttggcaatgcttgagaggtgaaaaactatgatg

SEQ ID NO: 13244 - DNA, 261 bp, Unknown
  gut microbiota DNA sequence
tccccaaaatagatgcataactgatccagtgtcagaccccagtcccaagcctttccggtccatttttttgtagcatccatcattgccagataaagcatcttgaaaagtgcatcatcggtcggaaaaatagtcttggatttcgtaaccttgcgtagctggcggttaaaattttcgatggaatttgtagtgtatattaatttacgtatctcagatggatatttaaaatatgtggataattgtgtccagttatttctccaggat

SEQ ID NO: 13245 - DNA, 1697 bp, Unknown
  gut microbiota DNA sequence
atttgctccggttcttttcggattgttatttctggtaggatttggaatccttgcatatccgacgatttcgaatcagtggaatacttaccggcaaagtcagctgatcagcaattatgagagtagcgtaaataacatgacgccggaagattataccgatgaatggcagaaggcagaagattttaatgcgaccattacatacaacaacctgtatggagatgtgtttggcgaaaatgacggagatttgaaaaataccgattactggaaagtgttaaatgtcggggacgacggagtcatgggctatctgtccatcccgaagatcaatatcagacttgcaatctatcatggaaccggaaatgatgtgcttcagaccggagtcggacacctgaacggaacgaaacttccgattggtggtgagagcaatcataccgtactggcagcacacagaggattgccgagtgcaaagctttttaccgatattgaccagatggaaatcggagataaattttacatccatgtgttagatcaggtattagcttatcaggtagatcagattttaccgatggtagacaaggatgatcacgagacattagatgatgcaatgaagatagaagacggtaaggatcaggtaactttatttacctgcacaccatatggtgttaattcccaccgtttacttgtaagaggaacccgcgtagcgtataatggagaagaggaagcaaccggatcggtggcagacagcatgttacattccatccagaattactacatgttgtatctgatccttggaatcgcagttacggttctgctgattctcattatgaaagttgtatcaggaagaaaacagcgtaagaaataaagcacagactttaaaggaggatacgaggcgatgatgaaaagaaaagtaaaagcaggaagtgccattttcctggctctggcagtggcattctccgtatttgttctgcctggcgtatgggcggcagatgcgatacaggttgacagaaatgactgctccgtggaattttccgttggaagtgattataaagagctgttgacatcagacgtgacaattgatttatacaaagttgcttctgtggataaatcaggaacttataccgctgagccggatttcaaagggctggatgtcagtgcactggatatcgatgatcaggcaggttccgcagcgaaatggtcagagagagcagcaagcgcagcacagaaggtgacagagaagaatctggatgcaactgataccgttacaactacaaatggaatgacaaaatctgagggacttgagacaggactttacctgattcagccggaagaagttgtaacagataattatacgtatacatttgcaccgtcactggtagctttgccgaataactattatggaaacggcggcagtgatacatgggtttacaacctgaccggagaaaatggtattaccttaaaaccggaacagcatgcaagatacggtaagctggtgatcaacaaaatactgttacatcagaatgtgacatccggtgacaaagcaacattcgttttccagattgatattgaaaatccggatggaacaaaagaatcaaaagtagaggcattagattttaaaaccgcaggatctgattccattacgattgagcatctgcaggcaggcgcgaccgtaacagttactgaggtgtacagcggtgcttcttata

SEQ ID NO: 13246 - DNA, 200 bp, Unknown
  gut microbiota DNA sequence
tactatggcatacagattaaaagactatctttataacgataaactcacaaaggaacagaacatactcatggaccggctgtataaacttcgtatgtccggtatggctgaagcctttgaaaagcagcttctggaaccaaacacaggtctcgaaccatttgaagtccgctttgctgctattgtaaatcaggagtgggatcagc

SEQ ID NO: 13247 - DNA, 409 bp, Unknown
  gut microbiota DNA sequence
tattgcaccaaatgccatcccaattattatcattcgaccacattctcttgcagattccaatgcaaatccatagctcaaaacacctgtcagaataaatataattgataaaaagtaaagaaaaatatttcccaacatcataggaatttttaataaccagcaaatcaatgtcattactacaagaatcaaacacaaaaacacttttattatgtacttaaccaacatttttaatccctcacttttttatctttccggacagcaagaatcctgccatccggacttccatttttttgctatccggacttccacttttttgctatccgggctgcaaaattcttgctatccaatacagttcattatcctttcgtgtatatcatttccgtcaaaatcatctcttctgcatcatgacaaa

SEQ ID NO: 13248 - DNA, 3372 bp, Unknown
  gut microbiota DNA sequence
ataaaaaggttgcaaaaaagagaaaagtttagtaaaatataaccatgattttttatgtattggaggaaatgacatgaacgtttatactactgacaagatccgtaacgtagttttactgggacatgggggttctggaaagacaacaatggttgaggcaatggcttatctgtccggaattaccaatcgtatgggaaatgtcacagatggcaataccatcagtgattatgataaagaagagatcaaacgtggtttttctatcagcacttctgtagtcccgatcgagtggagagagacaaagatcaatctgctggatactccaggatttttcgattttgtcggtgaggtagaagaagcagcagctgcagccgatgcggcaattattgtggtaaatggtaaagccggcgtggaagtcggtacacagaaagcatgggagatttgtgagaaatacaatcttccgcgtatgatatgggttaccaatatggacgatgataacgcaagtttccgtcaggtagtcgtagacctgcaggaattatacggaaagaagatcgctccgttacatttaccgattcgtgagaacggacagttcgttggctatgtcaatgtcattcagatgaaagcaaaacgctggaaagaggacggaaccgttgataagacagatgttccggattactctttcgaaaacttggagatctgccgtgaagcattattagaatccgttgcagagacaagtgaagaatatatggatcgttacttctcaggcgataccttctccgaaaatgagatccgtcaggtattacataccaacgtatgcgatggcagtatggttccgatttccatggcttccggcacaatggcaaaaggtatctacactttactggatgatattgtaaaatatctgccaagcccggagaaaaaacagtgcaaagccatcaatatcaagacaaatgaagtatacgatgcagactttaactttgcaaaagcaaagagtgcatatattttcaaaacaattgtggatccgtttatcggaaaatattctctgatcaaagttacatccggtgttatcaagacagacgatgtaatgtacaacgaagagcacggtatggatgacaagatcggtaaattatatgtactgcgcggcaacaaaccggaagaagtaccggagctgcatgccggcgatatcggagcacttgcaaaattaaataaagtagtgacaaccgataccctgtctacaaaagcaacaccgcttacatttatcaagacagctgtatccaaaccatatacatatatgagctacaagccggtaaacaaagccgatgtggataaagtttctcaggcattgcagaaaatgatgcaggaagacctgacactgaaagcagtcaatgacagtgagaatcatcagtctctgctgtatgccatcggtgatcagcagctggatgtagtggtaagcaaattaaaagagaaatacaaagttgagatcacattagagcagccgaaggttgcattccgtgagaccatccgcaagaaagcagatgtagaatacaaatacaaaaaacagtccggtggacatggacagtatggtcacgttaagatgacattcgagccatccggcaatctggaagaagcatatgaatttgaccagattgtagttggtggtgctgttccgaaaaactacttcccggctgtagaaaaaggtattcaggaatccgtagagcgcggaccgctggcaggttacccggtagtgggcgtaaaagctgtattatacgatggatcttaccatccggtagattcctctgagatggcattcaagaccgcagcaattcaggcgttcaaaaaaggatttatggatgcttccccgattttattagagccaattgcttcagtaaaagtattggtaccggataaatataccggtgatattatgggagatttaaataaacgccgtggccgtgtacttggaatgaatccggtagagggtggcaaacaggagattatcgcagatgtgccgatgtcctcactgtttggttacaataccgatcttcgttccatgaccggcggcagcggaacttatgagtatgagttcgcacgctatgagcaggcaccttctgatgtacaggagaaagaagtggctgcgagagcagaagcgtaaaatttaatatgtgaaaagaaatcggaagattttacctttgcggctaacaatcgcttgccaaggaaaaatcttccgatttctttatttcagagatgtaaattctttcgacatagaaaacgtaaatgggagaagggggcatttttctcaatgaatccttgtcccttcaactcacttgggaagacgaaagtttattgacattgtgatgtgcatctactataatggagttcgatagaaatacttttggtataccaaagaaaaccaaaaggatacaacaaacagcacaaaacgaaacaaaaacaaactaacaggaaagtgggactttattttagactatttttaggattattaaggagggaaaattggtgaaaaatgcaaaaaactttttctcatcactggaaatttccggactggatcaggtgatcgcaaagcgcagatatctgacaaaatgcgaaccgaaagttatggaaatcgatgacgaagagaaaattgtaaagacggcctgtcgtgcctgcatcgcaaactgtggtgttctggcgcatgtgaaaaatggccgtgtcattcgattggagggtaatccggtggatccgatgagccaggggcgcatgtgtgccaaaggtctgtccggtattcaggcgctgtatcatccgaatcgaaacaaatatccgctgcttcgtgtgggagagcgtggaggcggacgctggagaagaatttcatgggatgaggcgttgacccgtgtggcggaaaaagccatggaaacccgtgaaaaatatggtgcggaagcactgttttgtaccacaggaggaggtggtaacccggagatctggagtatcgcccgtttttgtaatattttcggtacaccgaactggtatgagccgggctgtgcgcagtgttacctgccacgtgttttgtcctgtgccatgatgtacggcggtgcagattccagtattgcggattccaatgcactggagctgtatgattacgaaaatgcgcagatcaaatgtctggtgctctggggcgcaggtcctgcctattctgcaccggccagtggcggtcgtatggtaaatgagctgcgtgccaaaggggtaaaaatgatttccattgatccacgttttacaccggatgcggctaaggcagatatctggctgccaattcgtccgggtacagatgttgccctgcagatggcatggatccgatacattttagtaaaccgcagatacgatgaggag

SEQ ID NO: 13249 - DNA, 764 bp, Unknown
  gut microbiota DNA sequence
cactctctgccgcaatccttacacttccaccaagccttacgattggcaaagaccgtaacctgagttggaagtgtcggataatttctgtccgaccactcggctgctatatccggcagaagtgttgcaaggtcattaaagcctgccaatactttactatgggaacaatatgggcagcctgtcctatttatcgtcctactcttaacagcagcttcccactcgtgtccttttttacatctccatatcactttcttatgagaaccgatagaaacctctgtcggttttatcttattcttttccgaccactgctttaccagtagcggctctaatgtcgccaaatcgttaatgcctgcaactattcttgcaccggagcatatcgggcatttctcgccgttggaacgagcctttacgcttgtttcccattcgtgaccgcaagcacctttccaccatactttcttattcgagccgaaagttatactgtccggtgtcagtggtaaattcttttctgaccactctgcaatcaattctggatgtactgccgctaagctgttactcatatcaaaacctccacttcctctgtgattaaagtatatgaggtttcggctttttcttgtagtttgcgaatatccgtaaaaatagaaaaagccctttgagaaaagatttctcctctctcaaagggcttgataaatgggaattttcaaattagtctttgcaaataacctttgaaccttcaccatcaattacaattccctgacggttgttaatcg

SEQ ID NO: 13250 - DNA, 1608 bp, Unknown
  gut microbiota DNA sequence
ctttagaggctgattgtttatcagccttattttttatataaaaagggagagaagaaaatggcaaaattattcaatcaaattcttacatcaatcgacgattttgtatggggcgttcccctgatcgtcctcattctggcagtcggtgtatttctgaccataagagtcaaaggtctgcagatccgacttctgccacgtgcaatcaaggaactttttgtaaatgaaaaaagtggtgacagcggagaagtatccagttttgcagcattgtgtactgcattgtccgcaaccatcggtacaggtaacatcgttggtgttgcaaccgcgctggtagccggaggtccgggtgcattgttctggatgtgggtagctgcctttgtaggtatggctacaaagtattcggaatgtctgctggcagtgaaatatcgtaccgttgcagaggatggtcatattgtgggtggcccgttctactacattgaaaaaggtatgggaacaaaatggagatggctggcaaagattttcgcatttttcggtgtttgtgtaggtttgtttggtatcggaacatttacacagatcaatggtatcacaaatgccgtacagacattttttgatccggataaaacatggaccgtgcatatgtttggaatggattattcctggacagttgtaatcgcaggcgtattgttatctatctgtgtcgcactggtagttatcggtggcatcaaacgtatttccagtgtttcacaggttgtcgtgccgtttatggcagttgcatatgtagttgttgtattaatcattcttctgacacatctcggagagattccgggagcgttcaggacaattattgagagtgcgtttggtctgcgggcagcagcaggtggagcattgggagcagtattgatggcaatgcagaaaggtattgcccgtggtattttctccaatgaggcaggccttggtagtgcaccgatcgcagcagccgctgcactgacagattctccgggacagcagggcctgatttctatgctgggaacatttatcgatacaatcgtaatctgtacaatgacaggactttctatcgtaattgcaggtacatggaatatcggtctggaaggtgtggcagttactacaaaagcattccagacgacattaccgttcccggagcagttttcatcctttattttgatgatctgcctggtgttctttgcatttacgacgattcttggatgggattattacagtgaaaaatgtctggagtatttatccaatggaaatcagaaagtagttaaaggttatcgttggttatatattctggcagtatttatcggaccgtacatgacagtttctgctgtgtggaccatcgcggatatctttaatggattgatggcgatcccgaacctgatcgcactggtggcactgagcggagtggttgtcagtgagacaaagctttatctgaaacgtattggaaaagcgtcttaagatgcgtatataaaaattaatttttagtatatgaaacgaaaatgtggtattttaccttcgcggctaacaatcgcctgcttaggaaaaataccacattttctttatctacgttttctaaataagcctaaaattttacac

SEQ ID NO: 13251 - DNA, 1995 bp, Unknown
  gut microbiota DNA sequence
ctgagatcaattttttcttgctatgttatccatcaccttttctttttctcgcaattattacacgcattcaaaaaaagatacccttttacaggtatctttctgtttttattatatgaattttaaatgatttcacacaggtattatcttaccgcatctgccatttctttcatctctttcgcattggtcaacaccgcatccgtaatcttcacgccgccaagcattcgggcaagttcctgaatactttcctcgcggtccagacttcggatattggaaatggtaacatctgcactggaagttttttcaattaaaaaatgatgatctgccatggcagcgatctgtggtaaatgggtaatacagatgatctgatgattctttccggtaagcttgatcttctccgctaccatctgtgccgttctgccactgattccactgtcaatttcatcaaagatcagtgtctcgatctcatcattttctgccagaaccgtctttaatgccaacatgattcgggataactcaccaccggaagcaacggcgtccagaggcttcaatggttctcccggattcgtggagatcataaaccgtgtctcatcccatccatttgcggtataatgatccagtctgccaaattccatctcaaactgtacatccaggaaattcagatccagcaatgcctgtctggtctggtctgacagctcttttgcatatttttttcgaatatccgttactgtttcacagcaatgctgtaatgcagcttcgctgctttttaatgttccctctaattcgctccgatattcttcataatgctgtaattgatccagtttttcctcttttgtctgcttttcctgcaaaatacgttctatcgtttttccatattttgcctttaaatgattaataagattcagacgttcttccacgctctgaaatgcttccacggaaaaatccagttccgacacatatcctgccagatcccggttaaaatcactgaacagattttcaatttcttccagctgttctgaaaaagccgcaaaagattcgtcaaactgagaaactgcgtgcagtgcacgtacagcacgtccgatctgatctgccgcattatcgctgccttcggaacaaagttcctgacattctgccgccgattccatgatctttcgtccgtgggacatccgccggtaatcttcttccagctcctcatcctccccgatccgaagatctgcattttcgatttcttctatctcatactgcaaaaaggaaatctctcttgcctgctgctccgcatccagagaggcttcctccagttttttccgaatctcggtataatgttcatattcttttgtcagttctgcttttggtgcttccagctcccgttttgcataggcatccagatacttcatatgatttcgctttgccagcagtgattcatgctcatgctgtccgtgaatatcaatgagcagtgatgccacttttcgcatcagtgcctgagaaaccgtttctgaattgatccggcagacgctgcgtccgctggcatagatttttcggctcatgataatctcgccatcttccggatatacctcaagctcacgcaatgccgcttcctgtaccttatgctccacagaaaaaatcagctccaccagcgcaaattctgcattttcccgcagcatggacttggagacctttccacccagtgccagattcacggaaccgataataatggatttaccggctccggtctcaccagataaaatattgagtcccgatccaaaggtcacctctgattcttcgatcagtgcaagatttttcacatgcaggtttaataacatactcctacttctctccttctactctctctgtagtccccgaagccgctgcatcagtgcagctgtatcctccaccgtacgcaccgcgcacataatggtgtcatcccccgcaatactgccgacaatctcattacagtccatggcatctaaagcaaccgcaactgccatcgccattccggaa

SEQ ID NO: 13252 - DNA, 1423 bp, Unknown
  gut microbiota DNA sequence
tttcctccagatcctgtcccgcatcatagagggaagtatatttctgctttcctcctttgatcgctacctttgtcagctttaattcccggatatcacgggataccgttgcctgtgtcaccttgtatcctgcttcattaagccggacacagagttcctcctgcgtatccacatcatatttccgtataatttccaatatttttgcatgccgttttgctttcacttctggcacctccatagcatgtctcacatacctaatccctatgtgttacatcaaataaattctgtctttccatattcacccagtctttgccgtttttaatgaatctcctgcattttttttcgcaggatctgtaagaagcttaactgattcagcttcagaatctttgcagattccggcgcttttttaatatgaatactgtctccgactttcatatgcacaaagcggtctccatcgaagctgacctctgcctcctcgtcctcctcctggcggcgttttgccagaatgacgtcaatctccgcatctgatccgactacgatactttttgccagtgcactgtgcggattgatcggcgtgatcagcatcagatctgctttcggatcgacgatcggaccgcccgcagacatactgtaaccggtagatcctgtcggtgtggaaataatgataccatcggcgctgtaagttgccagatactctccattgactgacacgatcaaattgacgatctgcggcatgccgcatcgatggatcacaatatcgttcagggcaaatgttgttttacccgtatcatccttggaatcacttcccgcgatcagcatgcgttcttccaactcatactgatcgttaaacagcttgtcaatggcatcaaacaccgtgcttcgctccagctcacacagataacctaacgttcccatattgacaccgatcagcggaatcccaatacttgccatatctctggctgcccgtaccagtgtaccgtcaccgccaagcacaatgatacaatccgcatctatgtcggactgctcaaaacgccgaagattgcgctcactccatccggtttttgtgctaacataatgggtgcaggttccaccttttgcaataatataatcggaaatggcattggtaactgccagattcatatctttatgttcgtttgtgatgataaaaaactttttcataatattacttatcaagctctgcatgtgcagcttctacgactgccaccggatcaacgctttcctcctttgtcgcagtttcgcttttctggatgtgcaccagatactcaatatttccctccggtcctttgatcggagaataggaaaggtgcagcacggaaaatccgtgttccagcgcaaaggatacaatgcgctctaccacttccagatgtactgccttgtctctgaccacgccttttttgccgacttt

SEQ ID NO: 13253 - DNA, 2022 bp, Unknown
  gut microbiota DNA sequence
ctatcctgtatcattcacatatagtaaaataatacatagaaaatcttggaaaagcaatattttcctgtgaaaaacagtacaccctcttttattagcacaaatcattcgttttcatccatggtagtcgtataataatatatttctcccttaaatttttgttataaaaaagccatccaaatcgttttcgacttggatggctaatttgtattcaattttattgatcttctactttacatccaaaattacccgttccagactccgctttgcaccctgctctttttcatctgccagataactatccaattcatcctttgtaaaataccgcacttgataaaaatgctgctgtgcacagctataacttataacacaggagttcgtatctgtttcaaaaatataattcacgattccggttccaagcatatgatcttcatcccgcatgtattccatctcttttgcagtccatatggtattttctcccatataagcatttgccattttttctgcttctgaataaaaattctggtactgtgcggcattttccactatctctttggaataattcgaaccggcatctttttctgcggaaatcgtttttatttctccattctgcagatcaactgatacaaggtaagaaatgccagcagtttcatcacggtaagaaatgcgatttgttgtaaatgtctcgccattttcatctaacgtctgatcatgttccgtttcaattgccaatgtatcagcatcaatcccatataaccggcttaacaaatcagaagctttttctacggcttcttcctgcaagatctctgtcacatcaacagaattttccgcttcctctgcatctttttgtccctgtgccgttacactgtaatcccgctttgcataaaaatcaatgagttccaacatctgctcatcactcaatgccatctccggcagataaaaagtgctgtcctgcgccagaaaacagatctgatctgatacgatctctgacttatccgaaatctgcaaaatatttccttccggaaacagcccttctgtcttatacttttctgccaattcattcaagcgcttctgctccttttcagataattctctggaaaatgtatccgcatctgctttggcagcatccttccagaaagattcctgttctttctccgacgtctgctccgcacgctgttttgcataattcattcccgcgcgtacaccgcctgcgccacacactccgatacataacacaatgcacgctgccgctgctattctctttttgcgctgttttttcacactcgtattcatttgcacttcctcttcacaacacgttctgatctgctcctgtaccatggtctggtaatcttccggcagaatcaccggatgcgccttcacatgctcccggatttttcggtccatctgctcatctgataacatgtccgctctcctttccgttctccatccattttgccagttgttttctcccggcagagagtctggtctttgtcgttccttccggaatgttcaacatcgcactgatctccctcaccgataaaccatcatagtaatagagaaccatgataacccgcacattttctgacagttccagaatcgctgaccacaaatgatcctgtggcacttctgtcacctgttcgtactgttccggatcagcaaaaagcacgaccttctgtcttttcgtgattgctgaacgggaaacgttgatcagaatcttcatcagccatgatcttgcacttgtacgttttctgagacttgtacgattttcaaaggcacgcacaatacattcactcactgcgtcctgtgcatccgcctgattttgcagtatggaataagccagcacatacatttccttttgattttccaagatcagctttgacaattcttccttgtttattacactcatataagtttgtccaccaattctctatatttttccctgtatcagatgtgaattcaagtcgaacgcacgtgagacttggtgcgtgattctggtcagcgaaagctgacatattcttctcagaa

SEQ ID NO: 13254 - DNA, 4448 bp, Unknown
  gut microbiota DNA sequence
agtctcacgtgcgttcgacttgaataacataatttggagacttttatgcttgctaactttgaacaacgggataccagtggtgccgaacgcgtgtggaccgggcgttaccgcaacctgcacaatctcccacactggcatctggaaaacgaactgatctgtgtggagcagggaatcgtcacggtctcccacaaccatcaggaatataccctgactgccggagaatcgatttttcttgccagcggtgagatccattatatcaaaagtgatccggacagtatcactgccattaccttatttgacgtggcgctgacggcagatctgacgagccattatcaactctgctgtgccaagctttccggcagttatccgatcctggatactttttcgaaaattcagaaagaacgaactttgaaaaaaccattttttgagcagcagacctgtgtactgatcacggagctgatgatccacattttccgggaagaggcttatacgccgctgatcagccgcccggaacattcttctatcgacaattacaaacatctgctggacgaaattgatgccaattacagctacattaccttttcggatgccgctgctttcatgggattgtcagaaccgtatttttcccggtttttccggaaaatctcaggcatgacgttttccaaatatctgaacaccgtacggttagaacatgctatccatatgctgcaggagcatccgcgacgattgtctgtgacagaaatcgcctcccgctgcggctttgaaacgatccgacattttaaccgggtgtttcgtgacattaccggcatgtccccgcgggaactgccgtcaaattatgtcccggatttcaaaccgatccgccggattgaagatgcctttaatccgacgctgcaaagttccgaactattgacggaaccagatacacaggagtaagataagaaaataaacagaaatggagaatttatttatatgaaaaaattaaaacagattaccgcactcattggtgtgatcgcactggtcggattatatgtgtctacactggtgctggcgttgattggcagtgcggaagcgattaacttgttaaaggttgccgtgtatgcgaccatcgtgctgccggtactgctttgggcgtattccttcatataccgtttgctgaaagggaaacaaaatgatgatacgtctgataaaaaataaaatttaaataagacgaaatcaaagactccttccgcaaccgctaaccgttcgttaccttcgttttgcttcagttttatcgcgctcacttccaactcctataaaagctggtcgtttctcgttcgcgcaaaattcgcaaaactcagtcacttactgaatcgcttgtcgcagaaggagtctttgatttcgtcatttacacagtgattttttcacttttcagttacaataccacattgtatcacattattattccgttgtagccgaagtatcagaagacgtatctgtttcggaagatgacgaagtcgtatcgtcagtatcatccacttttagatcatccacacctttattcagtgtcgtattcacataactgctgccaaccagataaacattatcatcaccgctgacctgtacataagtaccgcccacaatttcattttccgttccgaaagtcaatgttttttcactgccatccgaaaagttcaatgttacctgctgtgtcggctgatcaatcccgtactctgatacatcttcagggttctctacggtactatcagcagtcatgcttccaagggaggaaagcatggttttcattttatctgcatcaatctgcactgttggatctgcattgcagctccatgtatcatccgttttggtaaattccagtgtttcaccagaatactcataagagattccggttacatcatctgatgtaaactgcaatgcatagactttttcatcttcttcctgctgcgctgctttctgatcctgttttttctgatacccgttcaaacctgcggacgcagctacaattgctgccaatgcaatcaccaaaataatccattgtttttttctcatatacaaattcctttccagtaaaggatactctatacgcaattcgatccttaaaaaatgaccttttacctgaattgcgtacatctccacagaatatttcctacgcgcggcgtctgcgataccagatcacaatgccgatcacgatcagtgccaccggaagtaccatgacaagcaaggtctcactcatgatggctacagactgatttacagataacgttgtatatgtgtatggttttgcatcaatggatactgctgaatcagagcttgcaaatgtgcttgcaattcctttgaacagcgcaaggttctgtccggatacaatggaatccgcatcattggaaaatgccagaacggatgccactactgtaatatccgcaccgctctcactgtcggttacatttgctgccagtgtaaatttaccggactgatctccagattctttctcaaacgttgtaatatttgaaatatccgttttcacataagcattatcagatgttgtcaacagatccgtccatgttatggtatccgtatgtacacctgcatttgtcagtgcctgtgcatacggcataaatacataattgcttaccttggaagtctgtgttgcagaagcaacgtccggtaacagatagaatggatactgataataatgggaactgtcagaatccataaccagtccatttgtcacctgaatatcataagcagacaggataccgtcaaaattcggtgtatcttcggttttgttgtatgcagtcgtaacgatcagttttccgccaccggcaagataggtactgatttttgtagcatcgtctgcggagaaatcagaagtcggtccgttaataattactgctgctgcatcctctggaatagcttcctcctgtaataaggtcagatcctctacggaaatgttcattttttccaatgctgacttgaaggtatcatccaaagctgtctcaccatgaccggtaattgtgtatacctttggcagatcttcgctggttacatagctgatggcactggtcagctgaccttcgccgtcgtatgcagattttgtctgtgtataagtagaataatcaatatcatactgatacaggtcactggaagataccaccttggaagtattgccgctgactacaataatactgccgtcagacggtgcggtatccgtatagcttgcatagaaattcggtgaaactgccggatcaatatattctactttgatatgagaagaagcatcctcataattgctcagtgtccgcgccactgtatcatctgcactcttttcggatgataatacatacagcgtaacgtcctgtttcaaatctttgaccagatttacactgtcatcggtcagtgtatacagattctgagaagtcagatccacgctttttgctttctctggcagctcatttgcaaatacatttactgctacaacaatggcaagaccaatcactacaaagctggagttaaacacacctctgcggattttctttgcacttacggaccagcgatgtttctgtacaagctggcaggtcaggaataaaaataataccgtaccgctgacataataaacaatacctgtcacatccaaaataccgttgcagaaatttgtcagatgcgtctgtgtacataatgcattcagtaccttcgttactacattgtcactgctggagatcagtcctgtaatctgctgcatcataaatccgataaaaagcagagcgaaggacagtaccgctgcgatcacctgactctctgtcaatgcagaaacaaaaacacaaatggcaatggaaaggcagccatacagccaaattccaaaaattgctgcataagattctgtcattggcacgttgccaaaccgtgacagtaacaacgggcagaggcagattgctccgactacaatagaaaagattgctaccaatgccaaaaatttaccaataataacctttggaatcgacactggcgcggtatacaacagctgatccgtctttgttctgcgatcttctgccatactacgcattgcaaggatcggtatgattataaccagaacaaatgccacatttgaaagtgaataggacagatatggtgtaccataaatcaggttatttgctacaaaatataaattaaatacgaagaaaaatgctgcaaggaaaatccatccgatcacggaggtgaaatatgccttcagctctctttttaatactgctttcatgctttatgcacctcctcagatccggtcaattcaaggaatacatcctccagcgtctttgtatttactttcaattccagtaaaacaagctcatgtgcgacacaataacgaaatactgcttccctgatgtcctgattttcttttgccaggatagagagatgatattctccatgctgtgtttctacatgctgttcggattcttctg

SEQ ID NO: 13255 - DNA, 8033 bp, Unknown
  gut microbiota DNA sequence
tatcagactccattacttcttctgaaatctctctggtaatctcgcaggatttcacacccggaatttctttcatctgttccacatcactgcgcgcaccgctgaccgtcacttccaactgctgtgcaccgctcatacggctttccagatgctccatggaatcactggcaaccaggtttcctttggaaatgataaatacatgatcacataccgcactgatttcctgcaaaatatgagaacttaagatcaccgtatgtttatcttttaacgaaaggatcagatcacggatctcaatgatctgcttcggatcaagtcctaccgtcggctcatccagaataatgatctccggcataccgatcaaagcctgtgccagtccgactctctgccgataacctttggacagatttttgatcagacgcgccttcacatcatgcagtttcgtcagatccatgacctgtttgatgtctgcatttctgctgtgtttgtctatttttttcaattctgccacaaactgcagatattccaacactttcatatcaccatacactggtggaatctccggcagatagccgatgcatttttttgcttcctccggatttttattgatatcaaatccgttgattcttacctcaccggaagaagcgccaatgtagccggtaatgatattcatcgttgtggattttcctgccccgtttggtccaagaaatccgtagatgttgcctgactcaagtgtcaggttcagatcatttaccgccacattggcgccgtattttttcgtaagatgactgatttctatcaaaacacttcctccttcaacttccataaaattacttatagaactatcttatagaggaaatgtgttaaatattaggaaaaattgtgtcaattatgtgtccttttcccactcacgatccgtatttttcacagagtttgatcgctcaaatctgatctttttaaatgtaatacatactctcgtcgtatttttcaaattcctgataatcttttaccaaatctgccagtgtcagattccgcaaaaggtcgtctaaccgacgattgacttcatcaatgactcttgtctgaattgccactgcaatgcctttacaggcactttcttctgtcgtatcttcatccgcaatgtgataagttccatccagagcttccaaaatctctgccaccgtgattttttctgccggatgattcagcagataaccaccctgtggtcctttgatactttttacaattcctgctctgcgcaatgcagcaaaaacctgctccagatactgcggagaaatatcattccgctctgcgatgctgttcaatgccacatgcccatttttggaatgaactgtcagatcaatcagagaggtcagaccatatcggcttttttttgaaaacttcattttttataatacctcccatactccaatatttttcactttatacaaaaatcttactgctgtttctcatgtttggatcacagtaacatttaattttctcatttaatttaacaggcggattgcagtgatacaacccgcctgaatttctatacttttataaattttaaagtccgtatattgatattcaatttgcggctttacacacgaatctgattactgaattgctttgaaagcctcgtccagatcctgaatgatatcgtcaatattctctgtaccgatagaaagacgaattgtgtttggtttgattccctgatcagcaagttcttccggtgtgcactggctgtgtgtagttgttgccggatggataaccagggattttacatctgcaacgtttgcaagcagggagaataactccagattgtcgatgaaatcttttgctttcttctcatcacctttgatctcaaatgtgaagatagaaccaccgccgttcgggaagtattttttgtataatgcctgctggcttggatcttcagatacagacggatgatgtacacgctctacctgtggatggttgtttaagtactgaactactttcagtgcgttctctacgtgacgctctacacgtaaagacagtgtctcaagtccctgtaagaacaggaaagagttgaacggagagattgttgctcctgtatcacgcagtaagattgcacggatctttgtaacgaaagctgccggtccaactgcttttgtgaagctgattccgtggtagcttgggttcggctctgttaaagaagcgaattttccagatgcttcccagtcaaattttccgctgtctacgataacaccaccgatgcttgttccatgtccgccaatgaattttgttgcagaatgaacaacgatatctgcaccgtattcaatcggacgaaccagatatggtgttgcgaatgtattgtcgattaccagcgggattttatgctcatgagcaatgtttgccagtgtctcgatatctactacatcagagttcgggttaccaagtgtctcgatgtaaagtgcttttgtattgtcctgaatagctgcttttacttcgtcaatgttgaacggatctacgaatgtagtcttgataccatactgtggaagtgtatgctcaagtaaattaaaggaaccaccgtaaatattttttgctgctacaatatggtctccggcctgagcaagattttcaatggtataagtaatcgctgccgctccggaagctactgctaatgctgcaacgccgccttccagtgctgccattctctgctcaaatacgtcctctgtcgggtttgtcagacgtccgtaaatattacctgcatctgcaagtccgaaacgtgctgctgcatgatcgcagttacggaatacataagaagatgtctgataaatcggtactgctcttgcatctgtaactggatccggactctcctgtcctacgtgtaactgtaatgtctcaaatttaaaatttctgtcttttcttgcgattttctctgccattgttctttcccttttgcctttcaataattcgttgtgttcaggatctgcaaatgccgctcctgtttgttatctttgtttcacagatcctgaccgtcctgattggatgtttttttatgcctctgtgaataatggtgttgaataatatctgtcacctgtatccggtaataatgctacaattgtttttcctgcaaattccggacgttttgctacctgaattgctgcggataatgctgctccggaagaaattccgactaaaacgccttctttctttgccagaagttttgctttctcaaatgcatcatcattttcaattgtgataatttcatcatatacctgtgtatttaatacgtccggtacgaaaccagcgccaataccctgaattttgtgagctccgctcttaccttcggaaagtaccggagatgttgcaggctctactgcgataatcttgacatccggatttttggatttcagatattcgcctgtacctgttaatgttccgcctgtgcctactcctgcgataaatacatctacctttccgtctgtatcattccagatctccggaccggttgttgctttgtgtgctgccgggtttgccgggtttacaaactgtcctggaatgtagctgtttggaatctcttttgcaagttcgtcagccttctcaatggctcctttcattcctttggaaccttctgttaaaacgatctcagcaccatatgcttttaagatgtttcttctctcaacactcatggtctccggcatggtaaggatgattctgtatccttttgctgctgcgattgatgcaagaccgatacctgtgtttccggaagtcggctcaatgataacggatccttcttttaataatccttttgcttccgcgtcatcgatcattgcttttgcgattctgtccttgacacttcctgccggattgaagtattctaattttacaaggattttagcgttgaggttctgatctttctctacatttgtaacctcaaccagtggtgtgttaccgattaatccaagtgttcctttataaatgttagccattgtttcgtcctcctataaatcatatctgttttctatgttttatttgttgagtgtattatattccccttattcctatttgtcaactaggtttttgaagattttttatattttttattctcccagttcactcgtaccactcataaagataacgattatgctcgcataaggagttatctttatgactagggacgaaagaagcgccgttttatgagcaaaaatagcggcaacgcagcggagaagccctgtaaggggcgttttgcgaatggcgcgggtgaactgtacgcaaaaaaacaccttcttcagacacttttttgtccaaagaaggcctttccttgcttaaccaacttatcaggtatgttttgtatttttatatcattttatcttctcgataaagacattatagcagaaaccgtgccacatagcactcctgcacaagcccagatgatccatgtcaagtcccatcggttcgtcaaaaagctgaccgccagaaagattgccgtcacagaacaccagtaaatcctggaaatctgcgttcttctgccactgttctgtttatttttcaggctgtaatcatcttcctccagtaaaatcctgtaacttcccgcaatggttccggaccatacaaagaaaaacgttgcgattgccacaaaaatcagcaaaacgccaagactgtatatataataaatgtccggcatggaaaaggccgccatcagcatcataggaaccacgctgagaatggaaagaaccactcccgtcacaacgcatttgcgactcagcagtgcaaattcctgtttttcttccagaatcatagcccgaacttcctcatccgctataagatgctgtgtttcaaagaactgaaaacgttcctggggcgtgcccttaatgataaaaattgcgactgccacagccaccatacatagaagaatcgcaatgcccattccgcctgccatatcctctgtgattggaagcaccttatattctgccgttccgccaagcagtaaaagccatacaggagacaatacacacagaaatgttcctaatgcgatccacggagctttgtgctttgcccattcaatataatcctttgcttcctgcatggaaacatgatgcgtcggaatttcttcgtttcgtgtatcttctccaaattgctgctgtgtgtcattttgattattcacaaaatttcccctatcaggtggttccattttcatccgttcattctgtaaatcttcaaatactgtgtttctctcgttcagatccatttcttcttttaaaagagcatccgtagacacatcaaaaatctcactcatctttaagattttatccagatccggcacggacgctccgctctcccatttcgatacggactgtctggataccgaaagctgctgcgccagttcttcctgcgaccagccgcgctgctttctcattgccataatttttaccgcaagtttcataactcttgatacctttcctattataaataaattgtttccatctgatagaaggaaatatgctatcacatacttacccgctattatcaatagaacatttttccattcagcgtattacctatcaaacaaaaaatccatcagaatacgttctgcttttgatgtcctcagcaaaacttctcctgatggattcattatacgaaaaatcccgattgacaaccaccaattacccttgaaaatccgtcaactgccagttgcatcttcccgattttttcgtttttctatatttttcttcttgattctagcattttctgatcttttttactatcttttgattctgtatacaaaacacaaattccttttttgcttagatcctatgcttcctcttttttctctactttatcgtaatcatccaggaagtgatgtttcacaccaccctgcttataggcgataaccgtacttaagttgacattctccacacttttaaaaatattggattccacgaacggatttgtctctttcaactgacgaatcagatttttcacttccacacgtttagaagtattctcaccgccgcaggtgctgcaggtatcagtaaacttacatgcacactggataaaatgcaggtcattactgtcacgccatttcttgatatcatcctcacggatcagatacagcggacggatcagctccatgccttcaaagtttgtgctgtgcagcttcggcatcatagtctgcatctgtgctccgtagagcatacccatcagaattgtctcaataacatcatcataatgatgacctaaggcaatcttgttgcaaccaagttcttttgccttgctgtaaagatgtccgcgacgcattctcgcacacagataacacggtgatttttctatattgaataccgcatcgaaaatatccgactcaaacacggtgattggaatattcattctctttgcgtttgcctcaatgatctgtctgtttgccggactgtatcccggatccattaccagaaataccacttcaaaattaaatttgttgtggcgttttaactcctggaaaagctttgccatcagcatggaatcttttccaccggaaatacagactgcgatcttgtcaccctcttttaccagctcatactcacgtaccgcacgggtaaaacgacaccagatggttttccggaactttttgcggatactctgctcgatttccacgtactccggagtctcttcctctttttgggcttcttctttctgtttcatggattccatcaaccaggctaaatatccaccgttcaggcttcgggcatccacaccggcttcctgcagtgcttctgctgccggaacgctcatctcacctttctggcaataaataacaactgttttatttttatcaatttcctgtgattccgacagttcctctgcgctcagagccacactgcccgggatcacgccgtaggaacgcgcacgctcatcccggatatctactaactgatagctgtcttccggcattgcagacagttcctgtacggataattgtatttctcccatatgctctccatttctatatcacttatatgcttcattctcactggtagttacatttatatttctaaccgatactataaaaacaatacttttctactgcggcagttttgtcagatcttttgtaatctcacctgcaatgatcagtccgactactgacggtacaaaagccatgcttcccggaatctgacggcgcacggtacattttcttgctgttcccggcgggcagacacaattatttttacagttgttttctgtatctgcgatcggtgtcaggggcttttctttggaataaaccaccttcagatgatcaataccacgttttttcaactcgcggcgcataacttttgccagcgggcaaacagaagtctcatagatatctgccacttcgaaagcagaggcatccatcttgtttcctgctcccatggaactgatgatcggcacacctgcggcttttgcctgctccacaagcatcaattttccggtgacggtatcgattgcatctaccacgtaatcatactgtgaaaaatcaaactgatctgcagtatccggcatataaaatgtcttatatgtgttgacaaccgccttcgggttgatctccagaatgcgctctttcgctacatctactttatattttccaatcgtttttcttgttgcaaaaatctgacggtttaagtttgtcagacagatccgatcatcatcaatcagatccagtgttccaacgcccacacgcgccagtgcttctacggtatatccgccaacgccaccgattccgaataccgctactctggcactgaacaggcgctgcatgttgtcttctcccagaagcagttccgttctggaaaactggttcagcacagccggacgcggcttatgtgcacattctgtatgcaaagaagtattttcttccattcgtttctcctctaatgtatttttaatatttttcgaacatttcagaatccatatattttttaagattctttattgtttactgtttcactatgaattgcctgtgatagtatagcggattttcgcacaaaaaacaattacttctctaaaaataaacaattttccaataa

SEQ ID NO: 13256 - DNA, 1677 bp, Unknown
  gut microbiota DNA sequence
gaacaccctgttagatgtctatccatacgaatgttatcagaaatcctgcgcctcttctattcatggaatttcctggttttccggcgtgtctgcacgcaagggaatcgcacagggatatggtgacatcgctccctgcaattatcatgaagtaccagacctgatcgaccagtacgaacatattgatttttggtgtacccgggtaagtcccatggacgaaaacggatatttctctacctgtaatggctctctgggagaaattctgaagaaaaaatcttctcatatctttctggaagtcaaccataaccttccgcgtccctgtggtacaccaaaaatccacatttcggaagtcacagcactttatgaaagcaacgattccattccaattatgaagcgtggaaaaatggacgacacaagcacgaccatcggaaatctgattgcagaagaaatcccagacggcgccacgattcagtttggtatcggcgcaattccggatgctgtcggaagcgccctgatgaataaaaagcatctcggcatccattctgaactgctcaccgacagtatgatcgacctcatagaagccggcatcgttgacaactcccgcaaaccgttaaacacaggaaaaacgattgctactttcatgatgggatccgcgcatatgtatgattttgtcagtgataatccggatattttgttattaccagtcacacaagtcaatgatccgtacattatcgcacaacatccgaatatgatcagcgtcaatgcggctctggaagtcgatttttacggtcaggtctgcgcagaatccatcggaaccatacatatttccggcagcggtggacaggttgattttgtaaaaggtgccacaacatcaaaaggtggcaaaagttttattgcttttcattccaccgcgcaaaacggtaccgtcagccgcatccgaccgacactttctgacggttccatcgtaaccaccggaaaaaacgatgtagactacattgtgactgaatatggaatcgcaaaattacgtggtaaaacaatacgacaacgtattcaggctctgatttccatcgcacacccaaagttccgggaagaactaatctatgaggcccgaaaacggcttctcatgtaaaatggaatgtcacaattataaaatttcttcgtttcaaacagtatatagccagaaggattttggttatataaatcacctcaagtagacaagattatttctatcttttctatgagaaacacaaaactgccgcatttcgaatcatgcggcagttttttaaacacactctggttttggacaaccaatcagcgttacttttcttcgaaacgctcgtctgcttctacaaatccatgttcttttgcccacttcggaacatcgttacggatatcatcccaacttctgatcggctgctgtaaccactcattttcgccgcgtgtataacgataatgatgaactgcggacatatctttctcatctacctgagcctcaccgtaatctttctgagcgattctgtaaatggtactgtactgctcacttaaggtatggatcttcaaatcgtctaccagtaatttctctaacgggcgtttgcagaggtgagacatgattgtacgtgtctctcttggaagggatttgatcatacgtgcgatctcccatgcacgctctactacttttcc

SEQ ID NO: 13257 - DNA, 6212 bp, Unknown
  gut microbiota DNA sequence
atagtgaattaaaaaatatacacggatatagtcgttgtgatgctgctggactatcaaacatgcaacttcaaggagcagtatcaatatttgcagtcaatttaaaacgaattttaaaactaaagggagaagtctgcccaaatgaggaagaataggaaaattcatctctcaaaagggtagattttgcatccctcaaaacactattttagcaatattttattatcaaggaacattttttcacatatttgacgccctgcgatactaaacttaccactttttcagtggcgtccctatagaggtgggagtcatctcccatctgatatacctattattttgtacatttttcaggaggaaacatcatgataaataaagaatgggaagatttttttggcattgaagaagcatccgatccttcttatatagaaaccgatttcaacattaagcaaaaagatgccgttgccgtccttgcttcctgcgtcaatgcaaatggatgtgtcgatctgaactggatgtgtgaagcatccggtctttcactggatgaactgatacactccctgcatggcgcgatctatcaggatccggaagtctatgatctctgtcgcgcggacgatcagggatggatactcagagcacagtacctgtccggtcacattaagtccaaactggaaactgcaaaaagactgaaccacaaatatgacaatcgttttgcctcaaatgttgcggctttgaagtctatcatgccttcaaaatcagactttgatgccatcggattttccatcggttctccctggattcctaatgagtattatgaggcatttgcaccagatggaaaagaaggacgtgaatataacgcggaagaaatctatcagatgctaattcaccaaaatcatgcaaatagaatctctcagatgcagagcagaccgaatcatacaaatggtgcttctcagatgcaagcggatcagaataacacaaacggagtctctcaaatgcaaacagattcgaacaatgcaaataaatcctctcagatacagacagacaacgggaaatctgaaaagagttcttttgaccgacatgatatctggcagggtatctgcgataaaatacagcttcaggatagctggaataaaaaaatccaatctgcattcagacagtgtggtgattccaccggaatgccacagcatgtccgaaccatcgtacaggatattgcccgacgctccggtttaaactggaaacagatccttcatgattttttacagtccgacacctatgactacaactttcttcccccggatcgaagatatgcgttttccgatttttatctgcctgcatacaacatggatgaagaacatcagactgcggatgatatctgggtatgtatcgatacttccggatctgttacgggagaagaactgacctgcacgatggctgagattctagatgctatgagacaggcaggcttaaaaggaagcatttccttttttgacagcaacattacggagccggaaccctttgaatctgaaaacgacctaaaaaacctgaccgcacagggtggcggcggcaccagttttcatattatcttccgttacctgaaagagaaactgtatccgaatcttccacgggcaattcttatttttacggatggatgtgcaagatttccagatgaaaaagaggctttcaatgtgccggtattgtggctgatctgcaaaggtggaaatgcggatgtgccatggggacaagtaatccagttgtaacggtattctcccccgcgatttagcctttcaatcttgtcctcacgatggttcttatagtataattattttatatacgattacgataaaagcacaaagatatactgtatttcagacgaaaacaaaagggggattcttatgattaacattacatggggtaatcttatgccaccacgctgttcgcaggcatacattgtaaattttttgctggcgccttcattttttaataacccggatttgggaaaatcgattcaggagtcatctttttatcaaagaaaagacggtacgattctggatgcgctgaataacgttaaagcctttcgcagcagattatttaacttcggtgactctcccaagacatctgagaagctcatcaatctgctgttgttgaaaaccaaacaggacaatatcgcatatacactggatacttttccaatccgtcatgaatttaaaaagcaatggaaatttttcctcaaagaatattttggtgaccaatattccatataccttgaagattataaaaaatatattaatctcttccttgaggacaattacaccattgaagattttgaagctgaagctgacacggatttttttaaaagagtaaaatccgatcgacgggattttcaaaaaaacaaaattaccattccttatcacggaaatgaaattccgcttggcaaactgttgcattccatagaagctgccgattacagtaaatcccccttccttgatgaacgaaacagctccgatatttccagtgaggataatttattttttgaacgtctgtccaccttatccatcctcgcctgtgtctggattatttttgcaaaagtggaagaaaaagaaaacaagcagatcacatctgaaaggaaagacaaaaagaatgtatatgcagagctgattgtacgtctggctccgatgatttttccaacagagaccgtcaatacacttttttacaccactcctgaaaatgatggttcggatttcattgcagacacttttgaaatcccatcggaaaaaacagacactgctgaagccagaaaaatgttagctccggttccaggctacattaacgcaaaggcatttacagaagcgggcgaactctgtgaacaggtatttcagagctacaaatacgcctccgaccctgtcatggctgagactctgacgtatctgcatacctgctgtgtcaacggttatccggttcccaaagcattttcatccatcgaagatattgaaaaacaggcatactactatggcagtatttacagcagtcagaaaagaaatgatattaaggcggctcctgtgccttcaaagacagtcacatccggattttttaccgccaactgtaaaaataagatttatgactggatagaaaaaaccaaaccggaaagctggaagagttctgtctcaagtgtaccggaatcagcaattttaccgcatgtgcatcagagaatgctgctcattcatgacgattttgatcttaatctgcaggatgcccttaatgttctggatcgtatcaagaaaaatatcgctacagaaaaagaaacaacgatctctgactggaaaaacttcgaactgtacataagatgtgatgaggcggaagctactcctatactggatactgccctcagttattttacggaaaacaatgagatcagatcttccgcagatttttctctcattaaaatttatctgatcgatgaagcaaaacgaagcgcggattacctgtttgccagacatcctctgttttatccgctcactttgccaaaacggaatgcgaatgaaatagaaaaagtccaaaatatgcatctggtcatcttctccgataatccagatcacaactatgcaaaatggctgatcaaagaagccttttggaccttgccgcgcttatgcgaaaaaatcaataccaagatttccctgatttctccgcatgcttctgaaattgcagattccattttgttggattgcccgggactggctgatttttcttatcatgtcaatcgcaataaatcatacgcagatacggacaacgaatccaaaaatatccagattgatgatattccattcccggaaatctggtatcaggacacttccttttcaagtcgttccattttgaacaccttgaaagatatcagttcttccaacgattatttatacttcgttgtggactctgtttccgatgtaggaagcatcaaactggcaaccagaatccgggagcttacgatccgcaaatcggttctggacggacgtatcaacagttattcaaagaaaaattttatcattgcggttcactgtaccgatccggattatgcaggtttgtccaaagatctgatcattccaaaggaaacggagcatgcaaacaaatggtttaataattataattttattccgtttgcttctatcgcagatctgtattcctgggatcagttaaacggaggtgtcattgaagaaatatcacaatgcgttcatttgcagtactgtcagtcttctcagcaaaaagatgcctgctatgagaatctgaaatcatattttgagcgattatacaaccgtgattcttccttttctgctgccgtgagcatgccataccgcttatttgaagcaggaatcacaccgacaccggactggagttcctgggatattcaggatccggatgcctggtggaatccggaaacacgctctcatatggccgaaacatatctggaaaaactgaccgatacatccgtgacagatgccaagaatgaacatccttcgtttcatcaggatcttgtcgaacagcttgccaaatatgagcagatgcgttggtgctgctatcagttaacccgcggctggctgccagtagaaccatctcaggtattgcaatatatcaatagcggtgtgagccgccacacgttgcagattgcgaaacttcatccatgtatctgctcctggaatgatctgaaaacactacaggaaattttatctgatgaagccaaaagagagatctgcaccagcaagaatattgataccttaagcaaggaagaacttataccgttattaaatccaaaatttgcaaaatatttttcctatgaaaaagattattcgtattttcagaaactcaactatgaaaatattgaaaaaacagcggatatattgacgaatcaatggcacaccgaccaagctttttgattcagagaaaccagagagataaagcacaaaggcaggtataaaatgatatcaaaatacaaaaacgtagctgttatttatggtggaaaaggcagaaattacgccgaagcacttcacaaatccattttaaaaatatcagatgaggaacgatatcccatctgttccaaactcattatggaaacaattctgaccagtgaattgctctcagatgtaatggaattattcagacaaagtgaattttgcgtcggttttctcaccgcggatgatgtcgtattatcagaaaatcaaacatatcgtctgagacagaatgttgtatttgaactcggcatggcactgatgcagataggacgcgaacgatgcattctgttaagtgattttgacagcagagctgccggttttgaacttccttctgatatgaacagtttagagatcagacaatttgatcctgatgatatcaacaaagtaattcacgatgcgattgaaaaaattctgcaaaacagcaaaatatccattgtatctgaaacttgttcagaacttatcccgcaatatgataatcttctgacccgtgaaacctattacataaaccacgaaaacttatttttaagtaaacaggcccgtatggtaaatggaagcagcaactactttcagcaaatattaagacagtggtatgaggaatgttcctcattataccattatgatgaaaaatgcatttatttactggaaagactgtgtttcctcccgctttttggctgtacacaagaagtaaatacattcatgaaaaaggttgctgaccttgcatatgattacaagatatctgatataatactcattgaaaaacaagcctgtgaagaaaatgcagatatactttttcacaggcttgttctctcattctaatgttgacccgatcctattttcacttttgaaaacaaaatttttgatgtccattcactctaaaaactgtcacctgatataatttggcatctgaaataagaatggctactcatcctgtaaggaaacaaccgcctctccaataccaagattcattaactgccattcctccacggtatgaccttcccgctgaacatttaagttattctgttgcgcactgatactgtggttctgataattttcgcccagacggtttacgacaaactgacgcgtatcatagtcacacagcttgaaagaagatgtcagcttgcgctgaccagaatcacgcaccaagtctcacgtgcgttcgacttgaatgctctagctagcttccaaaataacgggcttaatatgctccttccagcactcttggatctt

SEQ ID NO: 13258 - DNA, 1616 bp, Unknown
  gut microbiota DNA sequence
ttatatcagatatatgattttacgaccactttttcagtggcgtcctataggtggtgagaaacaagctagtattagtggtgggagccaatcccccatctgatatagcctccggcaggattacagaggtgcgcagttgaagtatgtcatgcaattgcatgacgcgcacctcgcaacaagaatgccggagcattcttgaattgcataaccttagaatttttttattcgttttgtagtttttctttacctgctcagccatttcttatacgacagatcaatggcaaatgccccaagtggtgctgtgatcacaatcgcaagaaccgccacagtaagcaccgtatctccgcaggcgaaacctaatgccagcgggattcctccaattgcagcctgaacggttgcttttggggtatacgccagcatagcaaataaccgctcttttcgtttcaggcttgttcctaacaggcatacaaatacaccaagcattctgaatacaagtgcaccaacaattacaaggagagccttcgctccgacttttccaaggtatgatatatttactgttgctcctacaagcacaaacagaaaaacttctgctgccacccataactttccatattttacagaaagccgctttgcaacaacttctctccttttctgtagtcctacgccaataaacataattgcgatcagtgaggaaaatgtaatagcggttgtcaatttatcctcaagcactacaagtaaaaatgagatactcaaaataatcaacagctttgacgtatcacggatatgcacctttttgaaataatgtgctaacaaaactccaaggactaatccaatcgcgattcctaaaaatatggaaatcggaatatttacaaacttaagcacggaagcaccttctccctgcatcattccaacaaaagtggaaaacagaacgataacatacacatcgtcaacggacgcacctgcaaggatcaattgcggaattccttcttttactccgtagccctcatccataagtttcaccattctcggaacaaccacagccggggaaactgccgcaagtacagcacccataatagccgcctccaacgtcgttaatcccatcagttttggtgctaataaaatcatgccgatcaactcaaaagatgccggcacaaaacacataagaactgccggtctgccaatctttttcaaccccgatatatccagtcccagacctgctcttgtaagaataatgatcagtgctatttttcgtagatcggcagatatgccaagaatactgccatccaacagattcaagccatatggacccagaacgatacctgtaatcaacattccaagcagactcggcaatttaatcttctggcagagccatcccatgaacattcccaaaatcaggatcaatgcaatacttaataacataaaattcctcctatatacgcagaaaaagctgacactttctgcgttgatttattcgcagaagtcatcagcttttataagcggtttaagtaattttattaccaagggagaacttcattccctctaaattcttttgtaaggataacacacaaactatttttttgcaagaaaacattttgacttttttgtatgtcacatataaa

SEQ ID NO: 13259 - DNA, 167 bp, Unknown
  gut microbiota DNA sequence
ttttaaccaaatcaaggaagtcccctgcttcaattgcgaaaagcaataagcaggggtagggacttgcttgtatcaggaggggtgcaagccccttctgataagctgcgaagcagctatttggttatgagcaagtagcgaaggcggattgcgaatatcctttgactaaa

SEQ ID NO: 13260 - DNA, 957 bp, Unknown
  gut microbiota DNA sequence
ttccattacagatcgctgaacaggtcagccttgtacacaccgttctccagcatcttcttgaagctgtcctttacggctgcgacatcctcatggtaggtcattccgtaccaggtatcgttcgttttcagaaccttcacagacatcttgtcctgctccaacagttcaccgataaagattggaatcagatactctgctttcagcggattgcccggtacttccttatcgaagaactctttgaagccttcttccagtacatccagaaaatcgggagtcaggccccacatgttcatggataccagagaatcaacatcaatcacttttccgtctgcttctgccccatccgctgtctttacgatattcttagtctctacaacctcagtcagattattctggtcgtccatcttgcagatgccacgggtcacgccaccattatcagacaacgtgttcttcagcacaaagcccgccatacaggacttgccaccattcaccagatactcatggacggccttaaatccttccttgccatagtaatcatctgcattgatgacgataaacggagtcttgatgaccttcttcgctgccagcacagcctgaccggttccccaaggtttcgtgcgaccttccggtaaatttcccggaatatcgttaatatcctgaaaagcatagtctacagttacattgtgagaagagcaaatggaggcaatacgatcaccgatgacatctttgaactctttctcgatatccttgcggatgataaatactacatgattgaaaccagcctcaattgcatcatgaatagagtaatccatgatgatgtgattagaagcatccactggctccagctgcttaatacccgttccgaagcggctaccgataccagcagccatgataagtaatgttgtgttcataacctcttcctccgtataaatctttacttagcattaataaattaattca

SEQ ID NO: 13261 - DNA, 4560 bp, Unknown
  gut microbiota DNA sequence
atagaggtgggagtcatctcccatctgatatattattgattttgaaccaataacgaatcccattctgctaacatattctttcttactctgtatattttttgatcagtaaacttgcgttgtgtccaccgaatgccagagagtttgtcagggcgtactcaaaatccatatccacgccatgtccctgtacataatccagatccagttcttcgtccggatgctcaagacctacagtctgatgtacataaccattgttcatctgaagaacacatgcaataaattcaactgctccggctgctccaagcagatgtccgatcatggattttgtggagtttactttgatatcatatgcatgatcaccaaaggctgctttgatggctcttgtctcaaataaatcattgtgatgtgtgcttgttccgtgtgcattgatgtatgtgatctcttccggcgctacatttgcgtctttcagggcaaataacattgcattttttgcaccttctccgtcttctgccggggatgtgatatggtatgcatcactggttgcgccgtatccaactacttctgcaaggatttttgcacctcttgcttttgcatgctctaactcttccagaacaacaacgcctgctccgtcaccaatgacaaatccatcgcggtctttgtcaaacggaatggaacaacgctccgggttgttggatgtggaaagtgcggtcagtgccgtaaatccgccgacaccgatcggagtaatggcattttcagtaccacctgccagcatgacatccgcctcaccgtactggatggaacggtatgcttcaccgatggaatgtgtgcctgtcgcacaggctgttaccacgttaatactttttccttttaaaccaagctgaatggttacgtttccggttgccatgtttgtgatcatcaacggaaccagaagcgggttgattctggaaggtcctttttccagaagttttttgtgctcacgctcgatggactgtaagcttccaacaccggaaccgatggcacaacccacgcggtacggatcttcttttgacatatccagacctgcatcttcgaatgcttcttttgctgctgctactgcatactgcgcaaatggctccattcttcttgctgcttttttatccatgcggtctgctgcaacaaaacctttgacctctgctgcaacttttaccttaaaatctgtggtatcaaaataggtgatctcgccgaaacctgtttttccggctttcagaccttcccagtattcttctacgtttaaaccgatgggattgacggttcccattccagtaactactactcgtctcatctatgtgtctccttttaatggttattttctttgtttacatcgccatgccgccatccacacagatcacctgacctgtgatataggacgctttttcagatgccagaaacgcaacaacatttgcgatttcttctgtttttccataacgaccaaacggaatctgcgcttttcctgcttcttttgccgcatctgtcatctgatccatcatttctgtctcgataaatcccggtgcaactgcattcacgcggatgccgcggcttgcaatctctcttgccatggattttgtcattccgataacacctgctttggaagcacagtagttcatctgacccggatttccaagtactccggatacagaagaaatattgatgatgcttccgcttttctgtttcagcatatatcttgcaacgtgacgcatagtgttgaaacttcctttcaggtttgtatcaatgactgcgtcaaactcttcttctttcatcttcatcagaagattgtcttttgtaattccggcattgtttaccagaacatcaatgtgaccgaattttttataaatggatttgatcatttcttccacagccgcaaaatctgccacactgcactgccaggtctctgcctgaccgccagctgctgtgatcgtctctaccactgcctctgccgcttcttttgatccattataatttacaatgacataagcaccttcctgtgccagtgtcatagcaatctgtctgccgattccgcggcttgcgccggtaacgatcgcaactttatctgttaataatttttccatactgcctcctgcacttaagcaattttcgatatttctcactacctgtaaaactcactgtttataaaagtggaagttttatctactgagctaactcactcaatacactatcaagatccgttaccttatcgacgtgataagccggaacggttttatctatacgtttcataaatccacaaagggatttttttggtccaatttcaataaatgcctctacaccgtctgcgatcatgcgctctacgctctgctgccagcggacggatgaggaaatctgttttttcagcaattcctttacctgtgacgggtctgtcacataatcagcagttacatttgtaatataaggaactgcaatttcatgaatttctacatgttctaactctgccgcaagtttttctcctgccggcagtaacatggcggagtggaacggaccgctgacattcagtggtgtgcaccgtttcgcacctgcttcttttaaggctgctgctgccgcatctaccgcctgctgctcacctgtgattacaatctgtcccggacagttgtagtttgcgatggatacgattccttcggtctcctcgcagattttttcaatgactgcggtatcagcgccaagcacagctgtcatcgctccacctgtcggaaccgcttcctgcatatattctccgcgttttgcaaccacgcggaatgcatcttccggtgtcatcaccccggatgcaaccagagctgcgtactcaccaaggcttaaacctgcatttaccacagattccagtcctttttcacgcagtacactccagatggcaagctcatctgcaagcattgcaatctgggtgtattttgtgatattgatattttcgttttcttcgaaaagaagctccttcatagggataccgcttactttttctgccagatcgatcatttcttttgcacatgggaaagtctcataaaaatcttttcccatgccaacgtactgagacccctgaccgggaaaaataaacgctattttcttcatttcatttgctccttttcgcttatcatttcaacagcttttcaggaaaaacagtttttgttctgttcttcctgaatcaacttttcttattaacagtgcagtaatttttctgcctgctccataatttcatctacaatttccttacagctctgctcttttttgattaggcctgcaatctgtcctgccataacggttccgtttttgacatccccgtcaatgactgcatttcgaagagatccgacggtcagacgctctaattcttcaaatccggctccctctttctccagacgcagatactctctggacatctgatttctcagacagcggatcgggtgtccgttgcttcggccggttacttcagaatcaatgtctttcgccttgatgatcttctgtttgtaattctcatgacagatacactcggtagccacacagaatctggtaccgatctgtactgcttctgcaccaagcatcattgccgctgcaaatcctctgccgtctgcaataccaccggctgcgatcaccgggatatcaactgcatctacaacctgcggaaccagtgtcatagttgtggcagctccgatatgtccaccggactcggcaccttctgcaactaccgcgtccgcacctgctttttgcatcatctttgccagcgccacacttgcgacaaccggaacaactttgattccggcagctttccacatttccatgtatttgccagggtttccggcaccggttgtcacaactttgataccttcctccacaacaacatgtgccacttcctctgcatatggactcagcaacatgatatttacaccaaatggcttatctgtcagtttttttgcttcgcggatctgcgtccgaaccacatcgcccggcgcacttgccgctccgatcagtcccagaccacctgcattggaaactgctgccgccagatgataatctgctacccaggccatgccgccctgaatgatcggatattcaattccaaaaagttctgtaattcttgtcttcatttaaatttattcctctacaccatgtgctttcagataatcaatgattgctccaactgttgtaaggctctcaagttcctcagacggaatctcgataccgtactcctcttccagagccataaccagctcaaataaatctaaggaatctgcatccagatcctctttgaagttggactccagtgtaattttatcctcatctacagataactgatcagcgatcatttctttcattttctctaacataattttattcttcctttcaaataatttttatttcaaatattttgatattcaaagtatattagatttcttttcctttgtcaacaaaaaattttgaaaaagaattgacttttgttctacgaatttttatacttgtagtattctatggggtaaattcctatatagagaatatatagaaaaagatgagggcaattaaaatgagcaatac

SEQ ID NO: 13262 - DNA, 6727 bp, Unknown
  gut microbiota DNA sequence
tcccagctggaatgtcagattttgacaatttttgatgtagataatcagaattacattgcactggttccggttgataatgatgaggaagtgatcttctaccgctactttgaggatgaggaaggtaatccgtctctggagaatattgacagtgatgatgagtttgatgctgtcagtgaccggtttgatgagttactggatgaggaagaatttgatcagatgtaatttgcattcaaaacgaaaatttatgaaaagggagagtcaaatttatctcgctcactaacaatcgttcgctgagaaaaatttgactctcccttcttttacttttgtgaattttattcttctgtgactggtttttaggttatgaaaagccagcggttaatatatttttatctagtacatttttgcttttatgatacacaagataatatctttttattggtcttctatcgtttaattctggcagattcgcactctgtcaggaaccgtgacggatccatgtctttatttcgaatctgatgcggccagagcagatacaaccggttcttcgcccgcgtcattccgacgtagaacattctgcgttcttcttccaaatctgcatccagcactgcttttttatttggcatgactttttcgtttacgtctaccagaaataccgtatcgtattccaatcctttggatgaatgtaatgtgcttaagtttactccatctgtcgctttgtagctttttgcctgttcctccagttcttcccgcagctgttcgatatgctcaaaccagatgtcaaaggtatcaaatcctctggcattttcctgcaattcatccagcacgtctgtcagatcttcgaatggaatccggcgcacatccgcatattcccgcagataattttcatacgccacacctttgcgaatatagttgatggcagaaaacgggcgcattcccgcgatcaccttcagatccatctgcaatttttccaaacgttgcaccatccacccctgatcctcataaaattcttcccacacatcaaaagcaacttcctcatagggcagactttctctggaaagataccgtttcggacggttcatgatcttcagaaaattgccgcggctgcggtcacctctggcaatgtctatgtacgcaaacaaatcccgcgtgatccagtgatcgtaaatattcgggatcctgtcttttgccgtaaacggaatactgtaatccagcatcatttccatcagaaagcgtggctgcatattggtacggaacagcactgccatatctttgtactccattccttcccggtgcagacgcaaaatttcctgtatcacatacaaattttgttcccgctgtgtctgaaattcctgttttaccaccggaatccccgtttctgctgccggtgtaatctgtttttcaaatcgtttttcattaaaggaaatcagatttcccgcctgcttgacgatctccgctccggaacgataattggtatccagtattatttttccggcatttggataatcctttgtaaaattcagcataatctccggctttgccccacgaaatcggtaaatggactgatcatcatcaccgacgataaacagattatcctgcggtgccgccagcattcggataatgtcatactgaatctgattgatatcctgaaactcatcgatcagaatatactgatatttccgctgccatgccgccagaatatccggacgctgcaccagcagttccttacaatataccaacatgtcatcaaaatcaatgagccggttctgatgtaaaaaggattcataagcttcgaatatttttcgaaagacatcctgtccacagcaggatgaatagtaatgtgccagatttaccgatgtgtttttcaccagactgatttcagagaacagactggaaataaattcattctcatcatcatattccagacgcagtcggtgaatatattccttcataaactgcaatcgctgctcttcttttacaatgttatctgccgtatagccataggcatgttttaaaatcataaaatagaccgcatgaaaagtcccgaaagataccgatactctcctgccgcccattaatttttcaaaccgctgtctcatctccgtggctgccgctttcgtaaacgtaatgaccagaatggaggatggcggtatatggtattgttcgatcagatgctgcacccggcgggtgatgaccagagtctttccagaccccggtcccgccagcacaagctcaggtccgtctttgtgcctgatcgcattgatctgacttgtgtcaatcttcataaattattttaattctatctcccgtaattgtttcggaggcagtttttttgtagaatccttaacaatctgctgtacttccttcttcgcattcggtaccggaatcagcgtaccagctccggctacacatccgcccgggcatcccatgccttcgatcagatatccgttcttccgaccagcttttgcaagcatcagtacctttttacactcatccaaaccttcgacatgctcaatcagcacttctacatccggataatactcatggatacagttttcgattgcctgagacacacctccggctaccgcataaccacgaccagctccagttgcatcatgcagatgtccctgactctcaatcgtcttcggatcaatgccacgcgcctcaaacatggcatccagttcttcaaatgtaataacaaaatccacatcactgcggactgtttttctcatagcttccagtttctttgccgcacacggtccgataaatacaacctttgcattcggatgttctttcttgatactgcgggcggttgccaccatcggtgtcagctccttggatacactgtcaatgatctccgggaactgttttttcgccagcatggaccatgccgggcagcaggatgtcagcaggaatggcttttctcctgtttttacatggtaaacataatcatgtgcctctgtcacagctccgatatccgcaccaagtgctacctcatatacctgtgaaaatcctaatttcagcagtgctgcataaattttatccggtgtcgcctctttgccaaactgtcctgcataagccggtgcgatctccgcaacaacttctccaccgtttttcatacaacgaatcagctggaaaatctgggatttatctgcgatggcaccaaacggacagcttaccatacacataccgcaggataagcatttatcctgattgataacagctctgccatattcatcagattcaattgccttaataccgcaggcaacggaacaaggacgcacctttttaccgattgcatcatacggacaggcgcttttacattttccacatttgacacattttgacttatcaatatgtgcctgtccatccacatgtgtgatcgcatcccgcggacatacttccatgcaggaatgtgccagacatccacggcagaggttacttacctcatatacattatcctcacatgcgttacatgcagacggaattacctgcatcaaaggtggctcataatacatctcatccacggttgcttcatccaatccgcttgtaatatgaaccggtttattctgtggtcgaagagataatccaagtgccagtctggtacgttcggaacttactgcacgctctctgtaaatactgtctctgaaacgcggattctcatccggagataacttgtatggaattgcctccaaatcatcattgatattttcagactcatacgcaatacgcgcaacctcaacaaaaacatctttccttaaatccgaaacctgtgtgtgtaatcctctcatataaactaatcaccctttcctatggtctctcctatccctgccattagtttaaagcctaacccctgcacggtcaatagaaaacacctggggtacttaacaaaaaacaatcagttaccatttgcacactatcccccgccttttcatatgataaaacaaaccttagaataggaaaggacatcatattttgaactgtaattgcaattctatgaactctgatcgtccgtatatgacggattttaaacgtcccgactgtgagaaccagaccattgccatggcctacgttccctggcagcagttccggaatctgtatgatctggaccacgcccttcaggtcggtactatttttgtcgaattagataaaccgtttaccgggaaaggaggtatgtgtcgtgaacgcagcatgtaatgtagaaaaacagcggctgatgaacgccatttaccagtgtggattcgccatcagcgatattaccctctttctggatacccatccaaaagatccggatgcgctggattattttcagcatatgaaacacaaatataaccattttgtggcagaatatgaaacaaaattcggtccccttacccagaccggagaacaaaggcagaattattggcagtgggccgtatcaccgtggccatgggaaagggggtactactaatttatgtggaattatgaaaaaagattacagtatccggtttgtatcacgaaatccaatccggcgatcgcgaagattatcatctcccagtttggcggaccggacggagaactctccgcttccatgcggtatctgtcccagagatatgcgatgccttaccgggaagtagcagggttattgacagacattggaacagaagaatttgctcaaagaagatggaagtgactactatatataaaataagaaggttttggaaacttttatatgattatattacacgattacccgccctttttcaactctggcagtgacatttccggaataatcgaagtctacctttccatctttcacataccaaataccattgttgtttttcgccagaccggtataatcaaagtcaacttttccgtccttcagataccaccagccgttctggttctgtgccagaccgttataagtgaaatcaacttttccgttcacgattttccaccaaccgttttcattcttggcgatcgtgtttgaattgaagtcaactttgccgtttacgatatgccaccagccgttattattcttcgctacagtgtttgcagagaaatcaaccttgccgtttttaacataccaccaaccatttttattctgcgccaccgtggtgatgttggatgtgattttgccgttttcgtaatagtaccaattgccgtcggatgctttctggtccgccagaccgtcttttattccgtctgaaatagttttattcataattccctccgcgatagctttagcaacagctttataaccaactttcatgtactggttataatcgtcgcgatcatcaacaaagcagatttcaattaagatagccggtgctttagtatggttaaggacatacagatcgcttctaatcacaattccgctgccgtgtcttttgaaaccaattccttccattctggaaagaatacgttctgcaactgctttctttcctttgttgtcagcacttatatgacattccactccgccctgccgaccgtctccggtattatcatttcttccagagttcagatgaagcgagaaatcaaaatcaacagtatgcacattgcatttttttacgattttctcaagcacgtccctctggttcttgccgttatcctccgtacaatcatatacggtgttaccgtactggcgcagataattgataagttcgccctttaccagtctgttttctcttgactcatccaacagacctgatgcgccacatgcaatctttcccgctgggttgtgaccagcatgaacgttatatgttgccattattatcatcctcctcattctcatcaatatttactgcattttctgtatatcttttaatattcttcacaatcggcattaggaatttcggaatacttactccaatatcaatcatattttccagaatactaatcagttcattacagatgatccagattgccacaaaacaggcgaccaaaaatgtgatgtgcagatcatatcccagcgcgccagatgcgtattttaatagctggtcaatgattgctccaacaactaccagaagccacatggttacctttttctggattccgcgaatactcttataggaactgattttcccatccgtccggtatttcgccgccatcagccccgttgcataatcaatgatattgcatgccaccatcagaagcaccggtatatacagaactcccaggatagacgacaggaatgccataatccccgtgacaattacttttgctgtgtttacattgttcataagcgtttttcctttctatttttgctcataaaaagagccgactcaagttacctaataattttaaaattcttcacccgtgatttctgcatactgttcttccgtgattacacccttatcgcagaactgtctaacctgcttacgtgtgtacaatttaaggttatagaatttcttaattttctcatacattttcgtcattcctcactttccagcaacgtatcagtcatcagtgccgtatacatcacctgtgcttcaattctgtcctctgccgtagcttctggctctgggacttctgactgcatctgttcgatttctgcaatctcttcctctgtcatatcacgatacaccaatcccatcacaggcacttcacgggtacgtacttcttcatgttcttcaacggtcatatttccctcatcgtcatattccgctggaattgttacggtgtattcttctgttcgtgttcctgtttgtttgtactcagctattctcatgctctcaccccttttatcacg

SEQ ID NO: 13263 - DNA, 471 bp, Unknown
  gut microbiota DNA sequence
cagtgttcctggtgaatgctcggggagttccttcacatccatctttttcagcatctgcttgaaggtaaaatatttacaggaattgatctctatacatttacgggcaacttcttcagcagcacctttcgggattacttttactttatgcaggatacctgcacaggcattataagactgctcttcatgtttcgatgatttaaggagtctgtcaatcagttctgacattgcaggaccaatggcagaagcccagcggcggtaataattaccatcctttgcattgacttctttataataaaggtgttctggcggcatatgttcatctactgtgatatacagcggaaactccctataagaccgcttatgtgtacagatcagccgattatactgatcacagatccggatctctgaagcggttgccttcaggattgcaggcttgccacagtaagagtacaatacggagtagtagtggcc

SEQ ID NO: 13264 - DNA, 966 bp, Unknown
  gut microbiota DNA sequence
cgatacggtcatcgtagctctcaacggcaatcttggcacgctcgccggggatgcgggcaatcttcttgatggtaatcagtccgtcattgatttcgggtacttccatttcgaacagacgttgcaggaagacgggcgacgtacggctcaggataatcttcggattattattcttgttgtccacacgtgccactacagcgcgggcagtctcgcccttgcggtagaagtcactcggtatctgttcggtcttgggcagcaacaattcgttgccttcatcatcgagcagcagcatctctttcttccaaatctggtagacttccgcattgatgatggtacccactttatcaatgtatttgttgtaaatactatctttctccagttccaatatcttggaggccagtgtctggcgcaagttcaagatggcacggcgaccgaagttcgcgaagataacttcatccgtcacttcctcgcccacttcataagaagcatcaatcttttgtgcttcggacaatgcaatctgcaggttcgggttttccaaatcctcgtctgccactacctcacggttacgccatatttcgaagtcacccttgtccgggtttacaattacgtcgtaattctcatcggtaccgaacattttcgcaatcacactacggaacgactcctcgagtacgcttaccatcgtggttctgtcgatattcttcagttccttaaattccgaaaatgtatctatcaagctgacagtttctacttttttggccatagtcttatttaaaactgattaagtatttagtgtattttatctcttcatacgtaaaggtcaagtcctcgtccaccagcttgggacgcttggcaccttcctctttcactttcttctgaatggtcacgacgaaatgctgttcgtcggcttccttcaacacgccgctgagcttgcggccgtcctttgccagcacttccacttccttgccgatg

SEQ ID NO: 13265 - DNA, 1189 bp, Unknown
  gut microbiota DNA sequence
gcagcaatggctgtcttgtcggcttgcggaccgggtgtgccgcagctgggaaaggcatcgttggatgaggtgattggtgctatgaccttggaagagaaggcgcatctggtagtaggtaccggtatggcgggtttctcgggcgacagtgccgttatcggtgccacgaagaaactggtgccgggcgcggcaggaaccacatacccgattgagcgtctcggcattcccgccgtggtgctggccgatggtcccgccggactgcgtatcgaccccacacgtgaaggggattcggctacgtattattgcacccatttccctatcgggactttgctcgcttctacttgggaccaggaattggtggaaagtgtaggtcagtccatcggtaacgaagtgctggaatacggtgcggatgtgctgttggctccggcactgaacattcaccgtaacccgctttgcggacgtaacttcgagtattattccgaagacccggtggtttcgggtaagattgccgcagcttatgtacgtggtgtgcagagtaacggcgtgggtaccagcatcaagcattttgccgtgaacaatcaggaaaccaaccgtatggctacggatgcacacgtgtctccacgcgccctgcgcgaaatctacctgaaaggattcgagattgccgtgaaggaatcggctccctggaccgtgatgtcctcatacaactacctgaacggtgtctatacttcggaaaacaaagagttgcagacaacgatgctgcgcgacgaatggggtttcaagggcatggtgatgaccgactggttcggcggcaaggatgccgtggcgcagatggtggcaggcaacgacatgctgcagcccggtctgcccaagcagtacgaagccatcgtgaagggtgtgcaggacggagcgttggacgaagccattctcaatcagaatgtgaagcgcattctggaaatgattctccagactccccatttcaagggatataaatattccaacaagcctgatttgaaagcacatgctgccgttacccgccagtcggcgacagaaggcatggtattgctgaagaacgataatgcttctctgccgttggcagccgacgtgaagaacgtggcactcttcggttgtacttcctacgacttcattgccggaggtacaggctcgggcaatgtgaatcgtgcttacaccgttt

SEQ ID NO: 13266 - DNA, 2640 bp, Unknown
  gut microbiota DNA sequence
ccagaatgactcggctttgaaagtttccgagtgtacgttgtaaataaagggagaagaaaaacttcccttggcaagcgattgtcagctgcaaagggaaattttcttctctcttattcaatatcgtaaatttaattcacaaaataattttttcctactgagcggcagtcgtagttgtcgcagccccatcatctgtggtctgctcatctggcggaatgactaccggcacacccagatcatctccggaagtatccggaacttccacattatctgcatcatgctcattgaaatcagccggtgcattaaatgtgatcgtattggaactgcggaagatcgtattgcttgatccaacctgatttacaacgatctgtgagccggcttttaagtctgccatggaaatctccagacagtttccggaaatatattccgtagagactttttcaccatcgatataaaccttactccaaggagtgaagtttttaccaaacagtgtcaattttgtctcatccgtattcatggaagtgtgatcgatcacaacgtcctgaacacccattacaaggtcagatgccggatatttatctacaccatggtaggagtagcggtctccgtaaagcagatcatactgcagtaatttccagtttgtgaggtaagaagcatcgtcagtagatacgcctgcattcatctcagactgatgataacggaacatggttccttcgtgaataccaagctgatctgtgatataagacatcaactggtaagctgccacgtctttatcctgtttttccagaccaaagttgttccatgtcacgtatgtagtgtcatacaggtttccggtattcatatcggaatcttccagaccaagagttggaaggtgatcgccgtacataacaacgattgttttctcatcacgtttggataaagtatcgatcaggttttcaataaatttgtcaacttcgtgaagttcgttgatgtagtactcccactgataatgctcagcttcggtatcaccaccggttacctgaatttccggattttcaaatactttgtaatccgggtagcttccgtggctctgtacggtaatggtgtacaggaaatcggactggttaggagtagaatccagagtctttgttgtctcgtcgatcagaatgttatctgtcggccaggaagcaatttcgttatattctgtaatgttcatcagctctttgctggtgaaggtatcaaatcccatctgggagaaaacggttgcacgtccgtagaagttaccaccgttgttgtgaagtgcgtgtgttgcgtatccgagatcaccaaggacgtcagcagcactttcacaggaagtatcttttaaaaccgttttgtatgggtattcacccagaccgaagaaacgaatgcccattcctgtcagaacctcgaactctgtgtttgcagttcctgcaccgacaaccggaacggtaagatatccggaagtgtagttctgcattaatttatgaaaattcgggatcgggtcttcagagtaacttaaaaagtttaattcgtacggatcaatgaatgtctcaagctgtacgaaaatgatatttggcatatcggaagaatcgaccgttgtctgagcagtttttacattgtcattgatcgtgtcgatggtctcttcattatagttagccggtttactcataccagtgtctaccacgctggcggagaaactgtatacaaaaccgtagtccttatatccctgagccagatttccgaagtatccggaaagaatatcggaatggatagcagcttttgtgataaaaggaatcgttgctacacagagcaccagtaaaccaaggttacggaacaggtgaactctttctttgaatttcggtcccttgaatgcaaaaacgatcaggaacgctgcaagtgcgatcagcagagcgataactgcgatctcctgtccggcggacagatatttgctgtttttcatggagagcaggtctccgatcagtttcaggtctgcaaagttaaacggtgtgacacgggatgcaagtacgcagccgttgatgacaccgagcagcatccagaatacggatatcacgatacggaccagtgcacgatgtttgaacaggtacacgatcagcagcgttgcaaaaatcagtagcgcattgtaaaggaatgtcagcggggagctgatgcagaagcttactgctgaggtaaaggaatgtctggatacccattcaatcgcaaaaaccaggatgcatgccagcagtccgtggaacagtaaagaaaatttgttcataaattttacttttggactgtcagacagatccggaaaattgaaacttttcagaaaactgaaaaatccatgtcgtcttttggtgttgttgttaccgatgatgatcggtttttcttttctttcttttctaaatgatttcatataaactccttctctcaaaacgtactacgaaagatataaactttactattaagttaaaagaattttacataaccgtacagatattagtcccaattttacaaaaagtcaattaaaaaagtataaaatgcacgatatgaacaaaaaaaattcatatagtcattttcttttgtagaataatacagcagaattgtctgtttatgctatttatctcagtctgagttgagactcccact

SEQ ID NO: 13267 - DNA, 3670 bp, Unknown
  gut microbiota DNA sequence
aaaaaaatatctgaaaatctgaaaaattggcattgagtcgccgggtttgcctgtgctatactgaggtcaataagggtaaaacaaaatttagagataacgaggtagggtaaaatgaaaaaatatggatttggtgttgatgtaggtggaaccacatgtaagattggattgtttgacaataccggcgtgattttggataaatgggaaattaagacgaatacagaaaataacggagcatctattttagacgatatcgttgctgcattagaaggaaaaatggcagatgcaggaatcggtaaagatgacgtggaaggcgttggaatcggtgttccgggacctgttaaaaatgacagtattgtgtgtcagtgcgtaaaccttggatggggaacctttgatgtggcagaaacactttccggtaaaatcggacttccggtaaaagtaggaaatgatgcaaatgtagctgcacttggagaaatgtggaaaggcggcggacagggttgcaaaaacggtgttatggttacacttggaaccggtgtcggtggtggtgttatcatcaatggttctatcattggcggtgtacacggagcaggcggagagatcggacatatgaaggtgtctgatacagagacagatgtctgcggctgcggaaaatgcggatgtctggagcagtatgcttctgcaaccggaatcgtgcgtctggcgaaaaaacgtctggcagcagatgatgtagcaacaactctgcgtgatctgccggaagtgacagcgaaagatatttttgatgctgcaaaagcaggagatacagttgccttggaactggtagagaaacttggtacgattcttggcggtgcactggcttccgttgcctgcgtggcagatccagaaatgtttgttattggcggaggtgtttcaaaagccggacagattctgctggatgttgttcagaaacattttaaagagcgtgcattccaggcatgtgaggatacaaaatttgtattggcttcccttggaaatgatgccggaatgtatggttgtgcgaaaatgatttttggtaagtaatttttgtttaggataatttggaacaagcagaaacgaactcctacaagaacctgaaaaattttctgtgagcgctgcgtcgcttattttcgaccgcttccgcgaactcaccaacagcaaaaccagctgttggctcagacacactctcgcggtcgggctagacgcagtgctcacaacgaaaatttttcaatggttctttcgtaggagttcgtttctgctttgttccatttacgccgtggcaccgagtgacacgcatgcatatacttcctggaaaaaataagcgccgtgttgcatgcgcaagattaacataatgagaagttaattaaaataaaattttaagccacgcaaacaaggtatcaaaaaagcctgtccattggacaggcttttttgattgtttgttgagagttgtaaaaaagtgattttgaaatttcgttcaatttctaatattagaatactacatagttacctatttgtaaaattgaaaaaagtgatatgtgaaatcaaaaaaaatgaacgataaaggtttacttccatcgaaattcccgatacaataaatcatgagagaaaagtacgttttacaatggaaacgacatgtttcggaaatgaaaatttcctgagtatggatagcgttgtgggacaaatataatgtaaatggtgaaaaaatggaactacgaaatgtaaaaacgtttattaaaatcgcagagatcggcaatttttccagagctgcatctgatcttggttatgcacagtcgactgtgacgatgcagattcagactctggagcgggaattgggcgtatctctgtttgaacgaaatggaaaaagtgcggtgctttccgcagcagggaaggaatttttggattatgcttacaatctgcaacgctgtgaggcaatggcgctggagcattttgcggaaggggaagaaccaagcggagaagtgagtgttggaatcatggagacgctgtgcgcatcccgctatggcatcattttccgggagtttaagaagcgttatccaaaggcaaatgtgaaggtcgtggtggcaacgacgctggaatgtatggagttgcttggaaaaggcaagctggatctgatcttgacggtagataacaagatcaatcatattaactgggagacgacgcatgaagtgccaacagaaattcgttttttctgcccggcgaaccatccttttgcgggaaaaaaagatattccgttagataccgttttggaagaaaactttattatgatcgaggaaggctgcaattatcgtcaggcttttgaacaatatgtggtggaacagcggggacgcagaccgtctattaccgaaattggttacacccgtctgattatcgatgcggttatagaaaatctgggagtatctctgcttccgagatttacattggaagaagcattgcgagagaaaaaagtcgcattattttccgtaaaaggatttcagttgtctatgttgatgcaggtaatctacagcaaaaaccgatgggtgtcaccggcgatgaaggcatttattgaaatgacacagaagtttatgccagaataaaggagcaatatttatatgaataaaaaagaagttacagaaatcaaaaagttatttacgaaagagcgctgttgtctgaaccgactttgtgggtgttatgtggacgcagataaaaataaagttgtgcagtttcaggaagcatttttatctcttccggaggaagaaatttataaatatctggatattttccggaaaagtctgtctggcacattagggaaaaatctgttgaacatggaattcccattggagcaggaaatgggcgagggcacacagaaaagcctactggcgctgcgtgacagtgaattaaaagacgatgccatgctggatgctttttacgatcgcatcattgagacctattatcatccggaaaattatctgattttgctggtgcacggttcttatgatattccgatgaaaacatccgatggtctggaaatggacgatgcatcagattacatatacaattttgtgctgtgctgtctgtgcccggtaacgttgtcaaaagccggactttgctataacgcggagacaaacagtattgaagaccgcatccgtgattggctggtggacatgccggaacagggatttttatttccggcttttcaggatcgtaacacagatattcatcgtctgctttattattccaaaaatgcaaatgaactctgcccggatattactgagcagctacttggctgcgtgcagccgattcctgcaggacagcagaaagaatcttttcaggcaatcattgaggacacgctgggagaagaatgtgtatacgatgtggtgcgcaacatccatgaaaatctcaatgagatgatcgaggagcagaaagaaaacggagagccgttggaactggataaaatgcaggtgcgcaaacttctggagcgcagcggagcaccagaggaaaatctggagcagtttgaaaaacagtataatgaggaaatcggtgcacagatgacggttatggcaaacaatatttccgatacacgtaagtttgaagtaaagacaccgcagatgacagtgaaagtaagtccggaacaggctggtcttgtggaaacacgcatgatcgatgg

SEQ ID NO: 13268 - DNA, 550 bp, Unknown
  gut microbiota DNA sequence
ttcttgtttgtcttttaaggaacaagatggaaaaactccaatgcaggcacgccggatttcctatcttcgctgcgccgcttatttccgaccgcttccgcgaactcaccaacagcaaaaacagctgttggctcagacacactcacgcggtcggactatgctcgcttcgataacggaaatccgtctaccgccttgccttggagtttttccatctttgttccatttacgcgccggcaccgcgtgccacgcatgcacacaagctgatgacaaaatattcgttatgtcgcatgcgcagatttacatagagttaagaatggctgattatttcacagcgtaaatagagaaaacgaaaaatcctgtcaggaaaagcgattcagtgagcgactgattttcacaaggttttgcgcgaacgtgaaccgaccagcttttataggaggttggagtgagcgcgatgaaactgcagtgaaatgaaggtagcgaacgtctagctttctgacaggattcttcgttttcttaattatattaaaattttagccaaaacaatgacaaacaa

SEQ ID NO: 13269 - DNA, 575 bp, Unknown
  gut microbiota DNA sequence
cgctaatgcttcgtttcttaaccgccgataatgtggtatggttcgtgtatccttatgccccaacagccttgcaatgctatcatcatctaatttcatttctgtaagttttactccaaaagtgtgtctaaaacgatgtgtacgaaactcaaaataatttccattatcatccctgatatcattttcataaatcatgatatttacatgatatttcagcattgaatctgtatataatttcccattatcttgcaaaaaaatatattctgaatctggatggtccttttctgaaacttctattgcttttctaatcacttctgccagctgatcgctgactggtcttttgtatttccttgttttatgctggagaatagttataaaataatgcccagatttctcagataagcaatcccttcgcaaagtcaacgtatcctctattcttgtaccgagcatctgatgtattattagacatcttcctaactggggctttaattttgttaatgcactattaaatctcctgatttctgcatctgaatacgcttctggcaaagcgttgtcatatgctctgcaatcactggaca

SEQ ID NO: 13270 - DNA, 1128 bp, Unknown
  gut microbiota DNA sequence
acaagcataaaatcggcgtgttgatggattttgtaccggtgcattttgcggtggatgcctatgcactgtggaattatgacggttctgccttgtatgaatatccgaatcaggacgtaggatacagcgagtggggaagctgcaatttcatgcattccagaggagaagtgcgaagcttcctgcaatctgcggcagcgtactggctgtcagaatatcattttgatggtctgcgcatggatgcagtgagcaatctgatctactggcagggcaatgaggcaagaggcgtgaataatctggcggtttcctttattcaaaacatgaatcaaggattaaaggatcgttttccaacgactatattgatggcagaggattcttcttcctatccgggcgtgaccagatctgttcacgatggtggtctgggttttgactataagtgggatatgggatggatgaacgacacgttgaattattttcggacagcaccggagtatcgttctgagaactatcacaaactcactttttccatgatgtattattataatgaagcgtatgttctgccattgtctcacgatgaagtggtacatggaaaggcgaccattattcagaaaatgagtggtgactatgaagaaaaattcccgcaggcacgggtaatgtacatgtatatgtatgcacatccgggcaaaaagctgaattttatgggaaatgaaattgcgcagtttcgtgagtgggatgagaagcggcagcaggactgggatattttaaaattcccgaaacacagagaatttcatcgctttatgatggaactgaatgaggtgtatgagaaacattctgctttttgggaggcagattatgcacaggatggcttccggtggattgactgccatcaggaagaaaaatgtatatatgcctttgaacgaaagagcaaaaaggagcggatcgttgccgttttccattttggaaatacaaaagagcaggaatatgtaatgaaaatttccgggggcaagaaattaaaactgatctgtagcagtgatgattctgagatgaaaaaagcacatccggagtatcagaaagatctgcctgtgaaaaagggagcggtttccatacatttgccggcatacagtgcacgttttt

SEQ ID NO: 13271 - DNA, 202 bp, Unknown
  gut microbiota DNA sequence
cctcgcttttcctaattcctgtgcaaaacaaaatcaaatacatcaactgtaaatgctctgggaatgccggcaactccttaatcagatgagcaattgttttttctggaacacttctttcgttgtgttctggaaaacctttttttaaaaatcgttccggataaaacttcaacacttcaatatttttcattttcaaaaactgtag

SEQ ID NO: 13272 - DNA, 226 bp, Unknown
  gut microbiota DNA sequence
ttttaaaaatcgttccggataaaacttcaacacttcaatatttttcattttcaaaaactgtagaaatgtatgtatatgagttatatatcggttaaacgtggaatatttaatatcggacacatccaaaatagatacataatccgctatatcttgtatctccagttcagttactttcttactctgtccatccagatattttaaaaattgtgaaataaaacttattgta

SEQ ID NO: 13273 - DNA, 1909 bp, Unknown
  gut microbiota DNA sequence
aaataaaagaattacggttagaaaaaggattaacacaggaatatattgcacatatggcagatgtaaataccagtcatatcagcaatattgagaacaatcgtgtaaaaatttctctctctaccttagtacaaatctgcaatgcacttaacacaaccgtggattacgttatctccagcgaatatatttccgcagatactcctttagagcaggaaattcttactgcgctaaaacctttaccgattgacacaaaagaaaaagttttaaaaattatccatatcctgtaattttttactttccaacaatatttattctgtcacttatgtatttgttttctatagccaaaatgtaataaaaaaataagttgatgcatatttttcattcatatccatcaacttatctgctaaaaattcctatcaaataaaaaattccggtttcacactattgcatgaaaccggaatttttatcctacaatacgttctttgcttctttccacttaccatctctgagcaacgcattaattctgacttcccgctccacacgaatacgctctgcctcaaaaatatcactttcaaaatatttcttataaatactcttgcgataggctcttccgctctgctcacgaaccgtaccattctccagcagtaagattcgatctgcgcagtttgcaacggtataaaaatcgtgtgttaccatgagtaccgttcccttatactctttgattgctttttcaagggcaatctgcgcataagtatccagatgactggacggctcatctaaaaacaagacttctgcatctgattcgcacagtgctctaagctgtttgatgtttcgctcgccaccggaaagctgctccggatcatcatcaaaaatctgtgtgtaatatccgatacggtcagcatctgatttcatgctttcgtaaatatccttcaacatgctggattttccggttccattggcaccaacaatagctaccttctcccctgccttgatatcaaaggaaacatttttcaataattcacgatcaaaggaaagggcataatcttttactgaaattacaaccggtgcattttccggatcaaaatcctccggacgctccacctccgggaatgtaaaatcatatccatgattttcgataaacggatttttacactgtcttgcctgcagccgctccagataggatacacgggctttcagctgtcttccttttgctggattatcaatataagttgcctctgcacgaatcttctcaatgagtttttcctgcactgcgatccactccgcatccttagtcgcctgctctgccatctggacttttgtctccagcattgcctgattgtattctgcaaacgtacctgggaattcctgcagttccatgttttccagatgtaaaatcttattgaaacactggcttaaaagcagtcggttatgagaaatcgcaataatggttccctcataattattgatcagtttggaaagaccgataatattttcaaaatcaaggaatacgtccggctcatccatgatcagaagctgcggctttaagagcatgcttttgatgatagccagaagcttaaattcaccaccggaaattttcttcacggatgtatcttccagagcagtcatccctgcaatcgcaagttcttttcgaatattggaatcataattatacgcgtcaatggcatccatctcgtccagcactttctgataacggccgtatacctcgtccatatcttctgctctctccatctccgcgcagattgcttctgatttctgctgaagttcaacaaaaggttttgccagaaaatcaaaagaggaaatgtcctctgtctcatgtttcacaaactgcggaatgtaaccgattcgtgctgcttcgtctttttcaatttttccatcatacagataatcgtct

SEQ ID NO: 13274 - DNA, 676 bp, Unknown
  gut microbiota DNA sequence
ttgcatgacatacttcaactgcgcacctctgtaatcctgccggaggctatatcagatgggggattggctccctccactgatactaacttgtttctcaccacctatagaggtgggagtcatctcccatctgatatagtttttaaatcacccaaaaacataaaactccaaatccgacagcgatcagcgcacctgccaccacatcttttacaaaatgcacccgtccgctcacccgcgctgctgccagaaatccccctgccacacaaaggatcactccaagcggcatccacacataccacgccgccatagcgataatataaattgaaaatacatgtctgctcggaaaagaatttccttttgtatcctttgggatcaacggcttcacctgccatttttcgtaagggcgcggcgcattaaatttcttgcggaacagactcaccagcacaaaagtcaccgccggaacaagcagcacccgccaaaatcgactgtccctgcaaaccaccaaatacaaaagtaatgcaggataaatcagataaaccacatccgttaaaatatgatttacccgcagcagacagttcttctttcgctccgatgcttcaaatggtgctgccaatctgtcataaaactcctgcttcatcctgcattacctcatttcatatttttatttttctctgatgat

SEQ ID NO: 13275 - DNA, 2408 bp, Unknown
  gut microbiota DNA sequence
gtattaaggcttttttctgcctgtaatctcctacttttgtgcaaaaataatcacttccatcatgtatgagcgaatgaacttgcccacatggaaatgatctgtgccattgtccgtcaattaacccaggacctgacaccggaagaaattcagaaaagcggatttgacacctactacgtggatcatacccttggtctctggccaatggctgccggcggtattccgcacaatgcctgcgaatatcagtcaaaaggtgatgccatcacagatcttttcgaaaatatggctgcggaacagaaagcccgcaccacctacgacaatattctgcgcctggtcaaagatccggaagtatgtgatccgatccgtttcctgcgggaacgcgaaatcgttcatttccagcgtttcggagaaggactccgcctcgtgaccgaccggttgaattccaagaacttctatgcgtttaacccggattttgatgtaaaagcatcctgctaaaaacaacaaataatatgcgcatgctctgattattaaaattataataatactttttcgtaaataaaacgcctgtcaatgggtacctctaactacccacgcaggcgtttttcaacgatataaatttctttcgttatcaaacaatcgcacagatcatttccatatggtctaatgatcatctaagagccgtccaggaatacagtggataaaccgaaccccatcccgcaaactcaaatccaagtagtttcaaaacaatcggcacaaccaaaatcagtattgcaaagaacatcgtctgaatataattttttctccaatacgaaatcaacaaaaccacaatcacaactgcgatcattgacgccatttgggtcaaaagcaataacaatacgaaaaaccataccggaattgccagcggaaactcctgataacatggtatatccgtaatcgctgctgtcaattcatgcaacggataaactgacgaaatattcacaaaccgacatatcattggaagcactgacatgatcattgccgccatcatgcaaaccaccatttttctaacaatacttttctttcttccctgtttcgttgcacacaacaaataccatgaaccactctggtattccattgccatcacatttccaaatgcgatcaccatacacagtgaaagcagcaacagatcaatcagataatcgtcatttattcttccaaagaaatacagataacctgtgtcatagataaactcaccaccgtcttcctgtatgttctcatactgctgcatcacccgttgaaaagaaggatagaaaaatgttatcccataccagtctgccttcaactgctctcccgtgctttcatcaatctcaccgtccgaaaccaacccatcaattttctcaatttcagaaaacgcctgcgtataccgctcctgttccgataaaatcagcgcttctttctgctccgtcaatcccccttctaactgcatcatcagattctgataatactgttcctgcacggatggactatatttctgattcaaaacgcgaccaccgatcacaaaactaaataacaaaagaatcacaagtgcccgattcataatcattattttataactctcatagcggagtaatgatgcatgcgggtaaaacggtctttgctgttttgactgtctcttgctcaactcaaaatttgttccatgcagaaaaagcaaaatcaaagcagcaattccaaacacagcaagcataatgatcacgctccatgaaaccagtaatcgtgaaaccggatatccgccaatatcgaaattcaaatagcttccatacagattttctgttttcataagcccgatcagattgatatatttaaacagcgaaccttttccaaccgccggaatcagcagatacaataagtaactgcagccatagaacagcatccctgccagataaggcaaaaacatttgatccgtcaggatacaaagcgccgtaagaatcgctcccatgctaaaaagcactgtactctttgtcaaaaccgaacctgcaatataccctaaaacgctgatattcagattgctttccatataagcagctatcgattgaatacttgctgtcacatcttcaaagccaatcgtaacttccgaaaaaatcaaattgcagccataaagcaacgccgcaattgctatacaatgaatcagcaacgctgtcagcttggcacaaatactctgaaactgccctcttttcgtacttcgtgtaatataaaaaagctttttctctttttcttcaaaaatcaaattcccggcaaacagaaataccgacagaatcagaaatagatccgtccatatattttccatggaaaccgaaagtgcttttgacggcatccatcgaatattttgatccgacaatgccgcataatcctctgcacttttttcaatgtttctt

SEQ ID NO: 13276 - DNA, 5014 bp, Unknown
  gut microbiota DNA sequence
actgcaaatattcctcataacctgccgctttctgctgttcattataaagttcatcaataagattcttttcctgccagatagaatccgtaaaatgcaaatagctgcccgcttgatatgttttataatacttttcaaaaactcccggattcgcagtcatctcctgttcggcaagcgcctttccgctttctccctgcattttctgcatatccaagacattctgaactaagcagacaccatccatcgtctctttcagattggaaatataatcccctttttcgatttcagacatttccgctatctcattttgaaaagacttataagcagaaagcggcacattttcaccattcgaacaattgacataccacaaaagaaacaggtttaaaatcagcaacacacaaacggacaatgctaaacttcgcttacgccatatttttgcaagttcataataaatcagtctgcacatgaggtatcctcctcaaaaattcgcatatacaattcttccagaccatttaccctgccatatttgccgcaaaggtgctccaccgtatcctgatctatgatttttccagacttgatcagtatgatttcctttgcaattggttctatatcagagacaacgtgcgtggataccaaaatcactttatctccagcaagcgctgcgattcgttctctgatccgcacccgctccttggggtcaagtcctgccgtcggttcatccaacacaataagcttcggatcccctaatatggcctgcgcgatcaaaatacgctgtttcatgccaccggaataagtaccgatcggacggtttgcagcttccgtcatattcacataggacaatacccgcgcaatttcttcgggcatttccttttttgaaatgccttttaatgtcgccatataagctaaaaatcgttttccggtgaaagcatcatacagcccctgctgctgcggtgcataaccaataatacttcgatactgcgcaccaagacttttgatctcttttccatcccaaagtacctgcccgccatccggcttcagatttcccgtaacaatattcatcaacgtagattttcccgctccgtttggaccaagcagcccataaataccgggagcaagctccagcgacacatcatccagcgccagcttctctttgtatttttttgttatattcgtaagacaaagcatacactaacacccctttccaaccatcaggatcggctcatactttgcatttcctgcatacaaatctgacttatcgatcagtgcatatttgtattgcgtaatatcataggaattatcgcccagtggcgtgtattcataatcataaatcaccaaaatctgcgaacccacctctgccttaaactccagattccagccaagtgcctgatttacaagggaagaatgctgcacttcgccggtatctgtgtttacgaaataataagtacggtcattttcgtcattccaggtatcgcagcacaaaacatggtcaaacgtattcataatgtaattctgcgccagcgtacatagtaccttttcttcctttgtcgtcagattaatagtttttatctctccagtctcagaatttgacacgtaaagtgttccatccataaccgcgatactatgtaatgtcgcattgtccatccgatatttttcatccagcgtttttgtattcaaatccagagtagccacaacctcactggaatttttatacatattgttccagtcatcatcacttttagtgtaatcatccgttgtaagcgcctttccataatctgttccagataacaccaaggcattatccatgcaaccaataattttccagttgataccatcctcaaaattcagtgaacagatatcctccgctttttgtgtgcttttgttccaaaacacaagttttctgccggttgacgttgtgacgctgttattcccttctcccatcgtattggataactttttcgtcacaaaataaagtccggactcatctccaagtacaacatcttctacggtcagtccggcatcaaacgtaaacactttctgccgattggtgccgtcaagattcatttcatacaacactgcctttgcagcttccgtctcaactgcggcatcatcggaactaaccaccaaatcctgcgtcacggaaccttcgttatcactttccttgctcagcacatacaatttatccccataaacaaaaataccacttgcataaagtggaaattcattcatcagaaacaccgacggacaatccgccgtattgtgcttacatcccgcattactgcacaaatacacctcctgtttggttgcaaaatccatatacatcaggtgtgttccccacgtaccgtcttccagttctgtggcatccttcgtcaaataataatagccgtccttcgtgtaacaattcgccaaatgatccgaatcattcaaaatctgcaaaccttctactgcctgcccttttgatgattgttcttgggtcgactgctttttcattattcctccagccactgcctgttcttccgatacaaaactgccactactttcttttcctgtattttctcccagtgtttgaacaccatttccacaggcacataatgaaccacccaaaacaagtgacatcagcaccgcaaatattttcttcataaaaaaggacctccttgcatttattgccttacagcttacaaggagaccttatcatacaaaagtcaaaaatcagtcaaacttcttatgtccatttttatgtaatccttcttctcattgtgtctactttataaagtatcgtttaccgaaaatgttacgtttacgaccgcataatgtcccacatcatttcttatttccagacagccaccgtgttttttacacaggattctgctgatcgccagtcccattcccagatgtccatcctccgaaggctttgcaagaagcagttttttctgccttgtcagcacttcctccgaaaatccatttccgtcatcgataatcgtaaatgacaataattgattctctaacgacacctctatccgtacacgttcttttgcatagcgaagcgcattgccgaaaacattttccaacacgcgatacaaaatagacggatccacccagatttctatattttccaatacaatgtccattgtaagacgaatcttacgtttctgcgccatgatctgcagatcctcttccatgtcagaaacaaaatccgacgctttcaccttctgtcgattgacttccatgtcctccatctggttcagcgtacgaactgactctgtataatgctccagtcgtcgggcagccagatttaagttctccgcaattttcaaaactctttgattattcagctttcctttggcaagattcatctgcagatattccgtatagccttcgatcaccgcaatgggatttctcagatcatgcgcgattgatgcctgtaacaatcttcgttcctcaagcagattccacatttcccgataattttcacgcaatgtctgccgcatttgttcaaaggaaccacacagtattcccatttcatcctcattttcatattgtaaatgaaaatccagatcccggtcagaaatctgttttgtagcatcagacaataaattcagcggaacagaaagtttcttcctataaaaatggaatccacacaacaaaattccaacaatcgaaaacaataacggaaacacgatcatgaccgcaccacaaaaacgatatgccagttttctctttggtgttaaagaatccacactgttctcaatccgttggattgtatactttgtttgctttgatgccgcagccgttccatcttctgacattagaaccggaagctctgcgccttcttcgccaactttgacccgcatagaataagatacatttgttccgtccgcataggtttcatccactgtcaaaaacacattgttcgactccggcagcaaatattttcgaaaagtcatacatccaaaaatagtcgcggctgacaacaatacaataattgcaagcgtgatcaatacgctaaagaccagatatttacgcaagggtaattttttgattttctttactgacgtttccatttgtagcccactccccagattgtctctatgtaatcctgtcccgttgcttcatttaattttgcacgtattttccgcacatgttccttcaccacattgctgtcgccctctgcgtcatatccccataccgcttcataaatgcgctctctgtcaaacacctgattagcatttgtgatcaggaactcgatcaggtcaaattcccgtctggaaaatggaatctgtttgtcgtgataatacacggatcgctccgttaaattaacaatcaggtcattggatgtcaaaacagccgtgttggatttatgtttattccgttcatcgcgccgcaaatgggctgcaatacgtgctgtcagttcattcaagctaaacggttttgtaatataatcatcgccgccatattgcaatccattgattttatcctgttcggtaatccgtgccgtgacaaaaagaatcggacaatccacatgatttcggatattccgacacaactccaaaccgtccatgtccggcatattaatatccaaaatgattaaatctggattcttttgtagtaattctattgcttccctgctgtcatttgctgtgattgtctcataatcgcaatcccgtaaatgatccgaaagtaattccgtcatcattttttcatcatccacaatcaatattttataaaccattgatgctcctcccgtagtttcttatctgaatcagtataatctataaatgtcaaaaatttgtcaacgctcaatccctttataacaaatttatgctcctctcacaatgccgattgaataatacacccaaaccagatttttatttataactaaaaaaatactgcaagcaacatctgttacctgcagtatctttcgggttgggctgttttataaaaaacagagcagttcgtaggggaatcgaacccctgttttcgccgtgagagggcgacgtcttaaccgcttgaccaacgaacc

SEQ ID NO: 13277 - DNA, 9808 bp, Unknown
  gut microbiota DNA sequence
cacttttattttgtgttatactgttttatataattttcttggtctccgcttcgctacggtcggtgcaaagcggacatccactgaatgtcctgcacccttgtttttgcccttatcagagttcgtaaacactggtggaacgatataacgcaagggaaacactaagggaaagctcacctgcgataaactttgtgttttcaagggattgagagatatttgataataaaatataacagttattaaatcccttggaatatatgaaatctcaattcttgtttgtcgtttagggaacaaataaaaactaactccaaaagaagatatgaaaaattttctgcgaccactgcatcgcttatttcctaagcggaggtttcacctccacttagaatagcttcgcatgaatgtgcagagattcggatttgaaatatgtctgctatgcagacccgaatctcgcaccagaacttgccaaagcaagttctgatcaaattcacgaactcacccgcaaaaccggcgggttcagacacgctctcgcggacgggctagatgcagcggtcgcaacgaaaattttacaattatcctcttttggagttattttttattttgttccatttacacgacggcaccgcgtgccacgcatgcatataagacaatggtaaaataatttgttatgttgcatgcgcagattaacagattgattagtatttaagtcaaggtatgtgagacatggtgtctgatcctggtcagcgtaagctgacatatttttctcagaattactgcacatttccttaaattggctgtatacgccacccttgacaatacaaaaaaagaactgctataggttcattaccgacagcgaagaactcaagaacatgtagattttctccgtcgatgacaacagtgtagcagttctttttttgattgatcaagggcaagccgcttcgcggtggcttgcgtttccctctggcttagaatctaagaacatattgcggcttcgccgctacaatacatagtgcttttttatagtaaagtggacataagcatttccatttaccaacacttagttgttctacgcactagaagcagggaaatgcttattctgtggtaaagcggacattcgcaatccgctttcgctacttgctcatgaacgcagtcgctttgcgacctgtcagtgggagcttttaactcccactgacataagcatccccttacccaccgcttagtgctctacgcacttgaagcgggggaatgcttattctgcgttcataaagtgaatcagcgtgcacagcacagcgttaaatttgttactagttatatgtgcacgtggcacgcggtgccgtcgtgtaaacagggcataaatgaaatgaactacaaaaaagaatagttggaaaattttcgttgtggatgttgcgtctagcccgaccgcgggagtgtgtttgagcccgccggttttgcgggtgagttcgcgggagcggtcggaaataagcgacgcaacagacacagaaaatttttcatgttctttttgtagttcatttcattttgccctttacaacgacaaacaagaatttattcataaatccgttccggatgtgaatacacattaaatgtcttatccctggcaaaaccgatcagcgtaatcccaagctgctgtgccagacgacaggaataattcgtcggtgccgactttgcgatcagaatggaacaacccatggctcctactttttgcaggatttccaccggaacacgacctgagaagatcaaaatgccatctttcatcggaatcttgcgaagcaggcagtcgccaacgaccttgtctactgccacatggtggctgatatcttccctgtaagacagaaatactccatgatggacaaatgccgcacaatgtacgccaccggttcgatgaaacagtgcggaacgttcctctaattctctggaaaaagcaagcacttcactgacggacagtctcacatcatcccgttttggcacaatgccctgtccattcagcagcacttcatcttccagcaaaaggttttccatatcggtctcatcggtgagatactcacggatcgtaatatttaccattccatgttcctcatccacgtcaattgcccggacatctccggaactggaaatgtatccgcgcaggtacagatagccaaggaatgcttcttttttatcccatggggaacagatcatctcgcctactcccctgccattcacatataactgataacttacttctactaccagattttttttgtcggatactagtgcacttccattgtaagtgactacatcacgggttacaaaatattcatctctgatatgttctgccataagatccttccttaatttaatactcacctattcagctttcacaattcttccgaaacaatcattacgaaaaatgctgtctgttatgcgcgctcaatcttaactgcacaaactttgtactccggtgtactggaaatagaatccagtgcatctgatgttaaccagtttgcaccgccatccaggaagtggaacggcatccagcactcgcccggattggtctttccggatacgtttgctgttgtctcgatacttccacgacgggaagatactcttactctgtcaccgtctttgaaaccgatacgctcagcatcttctgtattgatctcgatgaaggaatgtccggaaatctggttcagtccttctgtcttgtcagtcattgcacatgcattatagtgatataatacacgacctgtcatcatcttgaaaggatattcctcatccggaagctccatggacggaatatactcgatcggattgcagtaaccaagtcctctggagaacttgccaacatgcatgatcggtgtacccggatgatccttggatgtacatggccactgcagaccgtttcctgctacttcttcgctgtccagacgctcatgactgatacctgcgaaggaaggagttacggaagctacctcatccataacctgtgcagaggtcagatgcggctgcggatatcccatacggttcatgatttctgtaaagatccagatatcttcttttgtctcgccttcgatctcaaccgctttacggatacgctgtacacgacgctctgtattggagaaggttccctctttctctgcgtaggaacgtcccggaaggacaacatctgccatttttgcagtttctgtcaggaataactcatccataacaaggaaatccaggttctttaatgctttcataacatgtgccgtatccggatcggtacgaaccggatcctcaccgaagatgaacagaccacggatctccttggtcagcatctttccgaagcactcggttgcctttgttccctctttcgggttcaattttgtgccccatgctttttcaaatttttccagaacacccggtgcgctcagtttctgataacccgggaactgatccggagaagcacccatatcgcaggcaccctgtacgttattctgaccacggattgggttaacaccacaaccaggacggccaaagtttcctgtgatcattgccaggttagacagagacataacgccctctgtacctgtatgatgctcggtaacacccagacagtaaatgatggctgcattttttgcagttgcatacattctggctgcctcgatcagtttgtctacatcgacatgacagatctctgcaactttctctgccggatatttatcaacaactttcttcatttcctcgaagttctcagtacgctcctcgataaatttgcgatcctcaagaccttcggaaaggatgatattcatcataccgtttgcaaacgctacgtttgtacccggtgtcagtttcagatgtacatcggctgcgtgtgccagatcgatatcacgcggatctacaacaatcagttttgtacctttatgtacggcacgacggatctgcataccaagtaccggatgtgcatgttccgggttagaaccaaccaacatgatcagatctgaatcctgtgtaatatccgcaatcgtatttgtcatagctccggaaccaagtgtagttgccagtccggctacggtcggtgcatggcagacacgggcacagttatctgtgttattggtatggaacgcagttcttaccattttctggagcatatagatatcttcgtttgcggaacgtgcacaggcaaatcctgccaggcagtctccaccgtaagtatctcttaactctgtaaatttctttgctacataatccagtgcctcatcccaggtagcctgctcgaattcaccggtctctttatttttgatcagcggatgacgtactctgtccggatgatctacgaaatcaaaggaaccactacgtcctttaacacagaccatcttgtggttggacggaccgtctgcgccctctacatctacgatcttgttatcttttacgatcagatcatactgacatccggttgcacagtgtggacatgtggtacgcacacgttttacttcccacggacgataattttttcttctcttgatggtcagagcgcctgtcggacaagcctgtgcacagttaccacaggactcacagcgtgtctcttcccagtcatcaccaaacggtgcatcgataatcgtaaatttaccggttctgcgcagtttgatcgctcttcttccggttgcaactctacatgtctgtacgcagcgctgacagtagatacattttgactgatcataggacaggaacggatgtgcatcctttttcgggatctcacattctaacagtcctctggaaccgaaatacggtgttgtatcaattccatatatattacaatatttctgaagttcgcagtcaccatttttctcacagttgaagcaatcaatattgtgattggaaagtaacagttttaaaactgtctttcttgcttcgattacacgctcgctggctgtctgcacaaccatgccttcttttgcttttgtgttgcaggctgtggcaagttcgttctttccttctacttctactacacacaggcggcaggacccgatgtcactgataccctctaagtagcagagtgtagggatttcaataccgacagtttttgctgcctgaaggattgacatgccctctgctgcttccacgtttcttccatctatggttaaacgcatctgttattacctccatatataaactctgttattttcaatatttagcggtcgatcgcatcctgaagtttaccgcacccgaatacatcacatcttaagcatctgccggactcctgcattgcttcttcgtgagtcatcgggcactctacatgctcaaaatcatgttttctctcataagccggacgctcgccaatgttgacacgaccggtcggaacacggttattctctcttgcttccggtgcttctacaccacagtttaaggtatggtggtaaccaagatattcatcgatattatgtgctgctacttttccggctgcaatcgctttgattgctgtggacggaccagttgcacagtcaccaccgacaaatacgcccggcataccctctacagcagtatccagaccagctttgaatacatgccactctgccggcataccaaactcttcaaacggctcgctgacgatatcctgaccaactgcgatcagtaccacatcacatggaacacgcaacggatctttggatgcggagtctaccggtgacggtctgccgccgcggtatgcaccgatcatctgtggctgtacccagagtgcacagcaatcgccgttttcgtccttctcaatgctctttggagcctgaaggagcatcagctcaataccttccataacagcggattcaatctctgtatccagcgctgtcatgtcttcctgacgtcttctgtatacgattcggacgtcttttgcaccacagcgaagcgcgcttcgtgcagcatccatagcaacgtttccgccgccgataacagcaacggtcttgcctgtataatccgggcgtataccatgtccgatgccatccagcatttctactgcggagaatacgttgtttgcatcaatgccgtccagacggagttttttacctttctgtgcaccgatggcaacaaacattgcatcgtggctgtttcttacttcctcaattggaatatctacgcctacatttgtattatattttacttcaatatttcctgtggaaaggattgcattcatatcctcatccatacggtctttcgggaatcgatagttcgggattccgtacattaacataccgcccaggtgttcttttgcttcataaacagttactttatgtcccatcagagacaggaagtatgcagctgtcattccggcaggacctccaccgatgattgctacttttttgcctgtagatacgtttgtcttcggaactgctacctgatctgctgcaatctggtctaccgcgtattttttaataccacggatattgacggaatcatcgatcaggtttcgacggcagcgctcctcacatggatgctcacagatcatggcacatgcagttggcagcgggttatcacgacggatcaggttgatcgcatctgcgtaattaccctcatgaacgtgtgcaatgtaacccggaatatcaacatgtgcaggacagagtgtcacgcatgggatcttctgacctacattggcaggacattcccatttttttacatggctctcatactcatctgcaaaagtttcaagtccttccagtacctcaatagctgactgataaccgatggcacagtctgccgtatcgcggatcatgatggcgatctctctcatctcatccaccatttccattgtgccgacaccattcaaaattttacttaacaggtctgcaagctgtggcagtccgtcacgacatggtacgcactttccacaagtctgattcatggaagcatgcagcagtgataactgtaccgtcagtggacatgttccaggcgggtaaacatctacttttctggaaaatttctccaacatatgcccgatggtaacatcctggctgtgctttccggcaagataaatcttactcatttttttatatccctcctaaccagtatcctgtcagaatactgtaatgatactattataacggcaaaaaagcgcttccggtgtatgccaaaagcactttttcgatgtttcatttgtgcatctcatacattactgaaactattttctctttatgcagctttttttgctttgcgcaggtagataaaccagtacgcacatccaacgcaaattgctccacccacaatgtttccaagtgtaaccggaagcaggtttttgctgaagaagttgccccaggtcagatttgtcagatctactcctgcgtctgttgctgcctgtacataagtcgcatttgtttttgcgaaaagaccggaactgatatagtacatatttgcaatactatgttcaaatccacacagcacgaacatcatgatcgggaaaaacagaccaacgatcttgctgactacttcttttgccgcaaaggaaatccatactgcgatacagactaagaaattacaaagaatacctttgataaacgcatcgctgaacggcatggaacatttgcttactgcggtagataatacggatactgccattccattgttaaacagggacggctggtgactgaatgcaacgcctgcgcctaccagcattccaccaatcaggttgccgatgtaaacaactacccagtttttcaacattccacctacagtgatctctttttccagaagcgggatcgtcagcatacaatttccggtgaaaagttcacttcccgcgatcagcaccatagtcagaccacccgggaatacacaggcaccgataaattttccaagtgacggttctgtaatggatactgcaacggtggtggcccccacgccgccgaatccgataaaggctcctgccaggatcgcaagaatgatcatttttggaattggtgtgttaaccttactttttccagttgcaatgtaatttttggccacttcggccggtgtaaaaaagttcattattatacctccattcatactcctcgtacatttgtatctattttaatacaatccttttatgctttgtatgtcaaaaaacacaaaaatgcactttaaaattatgctattcacacatttgtacatcgtggtataataggtgcaaataagtcatctcagtctgagttgataaaatcatgtcatcacaaaataatgggagcagataatttgtacaaaggagatttaccatgctgataccattgaacgtacttttatatcagctttctgcaaacagcatttatgaatcacagaatatagatctcaccgggaacttcgacaacgtgcagctttttgaccaggagcagcttaatgccgaattcggggatgagctctatctggtttccgaccaggtactcttaaatgcattaagcagaacgccagaggatcagtttccttccagatgtgtatttttgtgcatctgccaggatgaaaaacttcataccagtgatttccatccaaatctgtccatggtgttactctacacagatgaatcttttccgctggtgttcaaccgtatcctgaagatttttcacgattttgatatctgggataagaactttcatctgatgctgatccagcagaaatccctgcaggatctgttgaacctgtccaaagattttctggttcatcctatggtcgttctggatcgcaattactcgatccttggttatctgcgtgatccgaatgtcagtgatcccatcatggaatccattctgtccgccggttatgtgacaccgcagatcatggagcggctgcgtcaggacggactgatctccacctcagaacaggcagaaaatccactgatcagctggtacagtctgaccacacatgactgttattacagtatgatgtaccgtttcaagacaaacgggcacaccgttggctatgccctgatctttcactgtgccgtgcatccgcgtacgaattacctgtacctgatgaacattgtggcggaaaacctgcagttattctttcagcagaaacgtttttccaaccggtcttcttcagatatttacgaatcggtatttaacgacattctggagcatccggacgctccgcagcagcaatatgccgaccagctcagttatattccggatctaccgatgaacgggcgttttatgctggcggtcatccattatccggacgaacaggaactgccattttcctttgtcagctggaatctgcgcacttccattccacagctgaaaccgttcgtgtaccagaacacgttatatattttaaaaaataacagtgaaaatgagagttttgccacattcctgactccggaggaacaaacgattttccagaaaaatttccggaaccgatactttgaatgtggcatcagcaacacctttttctcactgatggatctgccaaccgctgctgcacaggcgcgggaagcattggcgatcggaacttccaagacagagggcggagccccgactttccattatttttccgatgtctatatgctgtatattttacaggaattaaaaaaagccggtgtggataaaatggcagcttcaccatgctacgaagtgctgcgccaatacgatgaaacccacaacggcgacctgtgttacatttttatgcagtttttgaaaaatggtcgcaacgtcaaccagacgtccactgctattttccagcatcgaaatacggtattgaacaaggtaaaaaaagcggtctccatcatgcagaatgaatgtgaagactaccagtcacgtatcgccttcatgctttcctatctgaatgatccgaaccgctagtacattttttaaaaagtaacaaaattcat

SEQ ID NO: 13278 - DNA, 4953 bp, Unknown
  gut microbiota DNA sequence
acaagcaagtccccacccactgcttattgcttttcgcaattgaagcaggggacttacttgattcggttaaaaatcagttcaatttgggggcagacaatgaacactacaaacataaaaaaagaatctagaaaaatatctttatgggaaaaattcagctacagcggtggagacgtggcaagctgcattacatttggtgcagtcagttcttacctttcctattattatacggatatcgcaggaatttccattgcggcagtgggcgtgatctttggtgtgacgaggttaatagaagcactggtgaatttcctgacgggagtcgccattgacggcagtcatttcaaagggggcaaggcaaagccttttatttataccaccacgattccgctgacgattatgtttatccttgtttttatggtgccggatctgagcgcacacgggaaagtgctgtttgcgtttgttacctatttgctattctgcattttgtatgcggtcaacaataccggttatggcacgttgctgtcattgctcaccagtgatgtaaaagaacgccgtgtattgaacagttttaaagtatttggaagcggaaccggaagtctgctggtgagctttctgaccttgccgttggtggcgttgtgcggtgtgcagggacgtttcagttttgcaccggtggcggtaatttacggtgtgataaatctggtgttacttggaaactgtagtatttcctgtcgggaacgtgtgcggacagaaggggaagcgcgcatgagtttaaaagaatctctgcaatgtgcggtaaaaagccgttcctggattttgctctgtgtgatcggggcttgcgtcatggttgtgatgatcctgcaaaaccagagcattatgtattattccaaatatattctgatggatgaaagccgggcaactttaattcttacgatctatacgatggcgcagcttttggcggcgttgtttatggataagatgctcaatcggcttggaaacagaaactgcatgctgtttggatttggagcctttctggtgctgacagtggttatgtttgtgtgcagaaaaaatctggtcttgttctgtgtatttatgcttttggcagaacttggaaaaagcatggcaaccagtccgtgttatgccatctgtgcagatacagtggatgaagtggaatcgttgaccggaaaacgcccgcagggtgtgatgacatcttttatgatgtgcacgatgaaagcgggaacagctatcgccggtgtggtattttcggctgtgcttcatgcgggacattatgcggcagaggcagcgcagcaaagcccggaagcgattcgtgcaatttatatgaatctgttctggcttccgatgctgatcgtggcaggctgcatggtgctggcatttttcttcaaacggcagccggttcaaaaataaggaaaaaattagaggcaaagagagacttctctttttacacactctgtgctataatgtgacgacaagtgacaagacagacaaaataaagaaattaaatgaattaattacgcatgaaaatgtatttgtctattctatgaaaaagtcatgctcttatagcaatatgagaaaatataaaggagagaagttttatgaaaaaagtactgaatcacatttttattgatggtttgagtggaatggcgcttggacttttttccacactgatcatcggaacgatcattggacagattggaactttagttggaaatgagattggaacttatctgattgcgatttccagtgtggcaaaaacagtgaccggagcaggtattggtgtcggtgtcgctgcaaagtttaaacagggaccgcttgtaacagtttctgctgcggtggccggtatgatcggagcgtttccggcactgggaatggaaagttttgcattgggaaaagcaggagagcctctgggagcttttgtggcagctctgatcggcattgagtgcggcaggctggttgcaggaagaacaaaaattgatattattttgacgccactggtatccatttgtaccggtgcggcagcaggatttatcgtgggaccgccaatttccaattttatgaaatggcttggaaatctggtaaatattaacgtagaggcatctccgattcttggaggtatcgcagtatccgttctgatgggaatgattctgaccctgccaatcagttctgcagcacttggtgtttccatgggactgacaggactggcagcaggcgcggcaaccatcggatgctgttgtcagatggttggctttgcggttgcaagttatcgtgaaaacaaatttggcggatttatcgcacagggaatcggaacatccatgcttcaggtaccaaatattctgcgcaggccgctgatttggctgccaccgattatttccagcgcgattttgggaccgatcgcatctgcggtcttacatatggtaagtacaccgatcggatcaggaatgggttccgcaggtttcgttggacagatcgcagcctatggcgcaatgattgagacaggaatgtcatccaaagtggcactgattcagattattctcatgcattttgttctgccggcagttgtgacattgattttctcagaaggaatgagaaaagccggatggatcaaagacggtgacatgaaactggaagtatagaatttgaaaaatagaaatgataccaaaatccatttacaaaatgtgggctatattttgtaaatggatttttttgtgaatggtacagggaatggtgacgtaaattctatggaatatcgaaggattggttgaacatttttacggattgttataaagtaatagcaacacaagtaaatgtttgctggaggtagaatggtatggaaaattttgtatatgaaacacccacgaaagtttattttggaaaagaagaagaattaaacgttggaaaaatcattgccagatatgcaccgaaaaaagtgttggttcattttggtggtcagtctgccagaaaaagtggactgttagaccgcgtggaaaaagcgttggaagcagaaggcattgcttatgtggaacttggcggtgtgacagcaaatccggagctgaagcttgtgcgggaaggtatcgcactctgccagcgggaaggcgttgattttgtactggcagtcggtggaggttctgtactggattcttccaaagacattgcaaacggtgtggcaaatccggacgtcgatgtatgggatttctcccttggaaaatgtgtaccgcagaaaacattgcgaaaaggtgcgattctgacactggcagcagctggttcggaaatgtccaattcctgtgttatcacaaatacagaaacaaacgaaaagcgaggctatggatgcagctgcaaccgtatggattttgctgttgaaaatccggaactgacctatacggtaagtccatatcagaccgcctgcggtatcgtggatattgcaatgcatacgattgagcgttatttctgcccgggcgaagatacttatctgacggatgccattgcagaagctgtgatcaaaaacgtgatgaaagccggaaaagactgtctggcagatccggaaaattatgaagcgcgtgcaaatatgatgtgggcatcttcgctggctcataatggtctgacaggatgtggacgaaagactcagcttgttgttcaccaattagagcatgaggtttccggaatgtatacacaggtggcacacggagctggcttggcagcactctggtgcagttgggcacgttatgtatacaaggcaaacatcaaccgctggttacagtatgcacagaatgtatggaatgtagatgtggattttgaacacccggagaaaaccattgagacggccattaacatgcaggaagcattttatgcatctattggaatgccaacaaatttgaaaatgcttggtgtgaaagaaaaagatttggagatgctggcgtttaagtgctccagagggaaaacacgtacactgattggttacaaagaactggcatacgatgacatattggaagtgttctgtatggcgtatgatgtctaaaaactcagttagtgcggagtaaatgatgaattttattgattcttataagaaacttgaaaaattatgcaatgagatgtacggcgataagcatggtgtctcattatatattgatgaaatgattaatacacctgtggattcgcgttatgttaaaagttggaatgaggatttgaagcaattgaaacattatcgttgggtgagaaatcaaattgtgcatgaaccgggatgtacggaaacaaacatgtgtaaccgtgatgatatacaatggataaataatttttatactcggatgatgtctacaagtgatccgctgtctttatatcgaaaaacaatcaggtcaaacagaaagactcattcatcatcagggggtaaatcggcatcgcggcagtgtgacgattcacaacaaaaaggaaagcacagtagattttcacaggaatctcacaggtgtggagtgttcgtttggggcactataattgcagtgatagttatattcctgttttttaaagttatattataaatttttctcagagatatatcgatatatttttatgacttagtaccttgtctatggttttgaatggacaaggtacttttttcgtttttatctattttgtgttttaggataacatcttttgtaaaaaaatattatgaaaatggaaaattctgtagtaaacgacaggctttttccgttattatatatagaaaagataaaacacaatctttttactacggatatctgtaacaaaaattttcaaatcttcacttaaaagatttcggaaatacacgtaaataacggggaggaaacgttatgcttttgtttttaaccatgctggacagcgatgaggaacagtccaaatttgttcagctttatcataaatatcggtattttctatggtatctggcgcgtgaacggttgcaggacgaccatctgg

SEQ ID NO: 13279 - DNA, 13114 bp, Unknown
  gut microbiota DNA sequence
ggttcctccatcggactttgccgacgtacttatgcgttcatctgtgctgctacctcagctgcgaagtcctcgtttttcttctcaagaccttcacctgtctcgaaacgtacgaaacctgtgatcttgatgtcagcgccaacttctttggaaacctgctgtaagtatttagcaacagtctgttttccatcctcagcttttacatatggctgctcaagcaggcatacttctttcagctctttgttcagacgtccgatgatcattttctcaatgatattgtccggtttgtccgggttctcatttttagcctgagcaagaaggatagatttctcatgctctttgtactcttcgcttacatcgtcagaagatacatatttcggagcaagagctgcaacctgcattgctacgtttgtaagagcctcttttacagcgtcattaacaactgctgtctcagcttttacaagaacaccgatacgtccgccaccgtggatataagatacgatgcatccgttctcctgtgtctctttctggaatctacgaatattcaggttctcaccgataactgcgattttctctacaagagcatcttttacagttttggaagaatctgcattccatgtctctgctaaaaatgcatccatatcagctgcatcagaagcaacagcctgagctgcaacagcctctacatactgctggaatgtctcgtttttagcaacgaaatctgtctcagagttaacctctacgattgctgctgtgttgtcaccatccatagcgacacgtacaagaccttctgctgcgatacgtccagcttttttctcagcttttgcctgtccgttctttcttaagaactcaacagctgcgtccatatcaccgtttgtctctgtaagagcttttttgcagtccatcatacctgcgccggtcatttctcttaattcttttaccattgatgctgtaattgccatggttttattcctccgatttcattcatagtgatgcggttccccgcaaatctacagattactcctctgttccttcagcctcttcgaaaacttcctcgtcagcctctacagtaccctgttttgcttcgataacagcgtctgccattttggaaacgatcagttttacggctctgatagcatcatcgttacccgggattacataatctaactcttccggatcacagtttgtatcagcgataccgatcagcggaattcccagtgtgtgtgcttcctgaacacagattctctcttttttcggatctacaacgaagattgcatccgggattctgtccatctctttgataccgccaaggtttttctcaagtttatcccactcttttttgaggttgataacttcttttttcggcagaacatcgaatgttccatcctcagacattttctcgattgctttcagtctagcgatacggctctggattgttttgaagtttgtgagcataccacctaaccatctctcgtttacatagtacattccacaacgctcagcttctgcctggatagcatcctgtgcctgtttctttgtaccaacgaaaagaattgtaccaccttcagcaacgatatctgctactgcattgtaagcctcatcaactttacctacagatttctgtaagtcgatgatgtagataccatttctctctgtgtagatgtacggagccattttagggttccatcttcttgtctggtgtccgaaatgtacacctgcttccagtaactgtttcattgaaataacgctcatttttttacctccatggttttgtctcttccatatgcatctcacccgccggttcaccctgtgggcaccatcccggttagtccgcatatgtgattaatatagtatttatctaaaaaagcgcacaaaaaaatttgtgacttttctcagaccgattcagtatagcatacttataggtacgcttcaagacatttttagtcattttttgccttgagattgtctaattcttcgaacactgcatcatttaatactttaatgtaggttcctttcattcctgaggaacgggattcaatgacaccggcactctcaaatttgcgcagtgcattgacgataacggaacgtgtgatgccgacgcggtcagcgattttgctggcaacaaggattccctcgcggccttccagctcatcaaaaatatgctcgatagcatccagctcggagtaagaaagtgtgctcagtgcagattttacaatctgtttctttctggtctcttcctcgttctcctcgtttacggaacgcatcatttccagtcctacgactgtggtaccgtactcgcacaggataatgtcatcaatatcaaactgtgcattctggcgatatacaaataaagtaccaagacgctcacctgcaatatcgatcggtgcgatggttgctgcatagcctttttcgctgtctaccataaatccaagtgtctccagatttacattctccttagtagaaaggatacccagtaatctctcatttaaagatgcatcaatataatttcctacctgatctgccagaagttctgtgatctcgatcacttccgggcgaagtcctgttccaagaacttttccttttttactgattaccagtacgtttgatgcaaggatatctgtcataacatcacaaatgtcattaaaaacaactttagacgaattgttattatgaagcagttttccgatttttcgtgttttgtctaataactgtacgctgctcatagcttcctccatatcatttttcttatctatcacgccgatttttcggcaaaaaaatagtgccaagataattaacaggcatatcttagcactatttttctgtaaattcaacaaattttatttaaatctgtcatattttttcaaatttcacaagaaattttaaaaatcacaactttttcagtcattttatacatttaattttgtataaaactaccctcgacgtgttattcttcggaagtttccggttttcccatgacataaccgcactgctcgtccgcgcagaccagcttgtttcctttttccaccatgtagccgccgcactgtgggcacgggatcttggacggtttctgccaggacatgaaatcacattccggattgttctcgcagccgtaatattttcttccttttttcgttttctttaaaacgatatctttgccgcatttcgggcaggctacgccgatcttttcaaaatacggttttgtgttgcggcactccggaaagcccgggcatgcaaggaatctgccgtgcggtccgtatttgatgaccatgtggcgtccacactgttcgcagacaacgtcggttacttcatcctcaatctttactttctccagttctgcttccgctgctttgactgctgcatccagatccggatagaagtttcggatgatcattttccagtctacggtgccttcctcgactttatccagcagggactccatatttgcggtgaagcgctcgtccacgatctccgggaaggcttccttcataatattattgacaacctcgccaagttcggaaacatagaggtttttattttcttttacaatatatcttctgccaagaatcgttgtaatagtcggagcataagtactcggacgtccgatgccaagttcctccagtgtttttaccagagatgcctcggtaaagtgtgccggtggctgtgtaaaatgctgcttcggctcgatttcttctttggtcagctctgaagtctcatctagtgattttgataaaaatacacggtcggatttttcctcatctaaggtataaacagacatgaaaccatcgaattttaccttggaagcagatacatgaaaacggtattttccggcaccaatgctaacagatgtggtctcatatactgccggtgtcatacagctcgctgcaaaacggttccagatgagttgatacagacggaacagatcgcggcttaaagattcttttaccatagccggtgaacgattcagatctgtcggtcggatcgcttcatgggcatcctggatttttgctgtatttttcttcacatcagcacctccgcccacataatcagcgccataattgctgccgatatactctgctgctgctgcctctgcttcctcagacacacgggtggaatcggtacgcaagtatgtgatcagaccaacagttccgctgcctttgatatccacaccttcgtataactgctgcgccaggcgcatggtcttctgagtggaaaaattcagatgcttacttgcttcctgctgcagggtacttgtccggaacggaagtggcggctttttggtacgctcgccttttttcacttccaatactttatattcggaagactcgatttcttttaaaattgcatctaattctgcctgattgtgaatctggatcttgccgttttcatcgccgtaaaattttgcaaccaatggttttttctcgccttttacgtttaataccacatcaatggtccagtattcttccggaatgaatgcgttgatctcgtcttcacggtcacagatgatacgcagtgccacagactgcacacgacctgcactcaagccacgttttactttcgcccagagtaccggactgattttgtaacctaccatacggtccagcacacgacgcgcctgctgcgcatccaccagattcatatcaatctcacgtggattcttcagcgaagcctttaccgcatttttcgtaatctcattgaatgtaatacgtttcgcatctttgtcatttaactttaaagccgttgccagatgccaggaaattgcctcaccctcacggtccgggtcagttgcaagatacactttatctgctttttttacttcttttcgcagatttgccagaatatctccttttccacggatagtaatatatttcggttcaaagtcattttccacatcaaacccaagctgacttttcggcagatcacgcacatgtccgttcgatgctgctacctcgtaattttttccaagaaatttctttattgtcttaacctttgcaggagactccacgattactaaatacttcgccatacttacctcttaacccctatgttcttacttatttatatacgtttacaaaaatagttttgaaaagtttcctgcaccagtccgtaccgcttgagtttgtctaaactatgcagtactgtaatcagatccaaacctgtttcttctataatatagttaatatatcggctgtggaaaccaagacaaccatacaccaacttttcgcttttatcaagggaaatattttttatttttgtcgtttctacctttttttcgggcaaatatcccagattttgcaaaaaaatatccagatcatagataattcccgcgccctgaccaatcagggcattgcatccgtcgctcaatacatctccgaagcgccccggcaccgcatagacatctttgccctgttccagcgccgcgtctgccgtgatcagagatccactccttttctttgcctctaccaccaccagactgtcggacagggcactgatgatgcggttgcgctccgggaagcgataaggcagcggttccgttcccggcggatactccgacaaaatacctccgccggaagtctggatattttcatacagattccgggcatttttcggataacagatatcgcaaccgcagccaaggacagcaaaggtgctgcccttcccctgcagggcaccggcatgagaggcactgtcgatgccaagtgccatgccgctgatcacctgcacgtctttgcctgccagcattttgccaagctttgtggcgatacttctgccatactctgaacacatgcgggcacctacgatgcctacgctttttcttgcatctggcatggaacccttgcagaagatcgcatatggcggttgtgcaatgtcttttaagcgctgtggatattttttacttccaatgggaaacatctggatgttttgccccaggaagcgctcccaggcacggttcagatcttttttgcggctttccaacagatgctgtagttcattgtcggtaaaaaggtgcatattttttaaagtttcttcccggagttcatagactgcctgtgcactgccgcataattcacggacttggattcgtttgctgctgttgatatttgtcagagaggctaaccagaaatcatactttagatcatttttcctttgattctctgctatctctccctgtttttcgctcttttctatcttctcgggaaattctctactttgtcttttttcagaatcttctctggcttccttttcttgggaaaacctttgtgtatgatcaaaaatctcgttctttttattcatttcacgcatacttagtccctcctccagtaattcttgtccggatttcggaacataaaagcttcttccagatgtccccactgaatattttccgctccttccatatctgcaatggtgcgggccgttttcaggattttcccataagtgcgggcacttaaatgatattcctcatacttgtcctgcatccgctccgcggactccgcatccagcgcgcagaatgtttccagatcttccatgttcatctgactgttaaaccgatattttctgccttcgaaccgctcccgttgaatttcatgcacccgttctacccgggcacggatcaccgcactgctttcttcctctcgcatatccactatcgttgtgtagcgaacttcttctgtttccacacacaggtcaatacgattcaaaaatgcctgtgaaatgcggctgatgtagtttttgatcgcctgcggcctgcagttacagcgatccaaattagggtagaaaccacatggacaaggatttgtagatgccaccagcataaaatccgccggatagacaaaactgcctcctacccgggaaatgtggactttcttttcctctaacggttcccgcaatacatctaaaattcccggtttaaactccgccagttcatccagaaataaaattccatgatgcgccagactgatttctccgggatgcggctgctttccgccgcccaccagagcctgcgccgtcaccgtatggtgcggactgcgaaaggggcgttcattctgaatgatacgttcctgatccagcagaccacagagcgaataaatctgagaaagttccagtttttcctcccggctcagttccggcaaaatcgttggaatccgtttcgctgccatagtctttccggaacccggcggccccatcatcaacagattgtgcatgccgctgacggcgatctcgcaggcacggcgcagcatcggctggccccgcaattccgaaaaatccacatcatactctgtcttccagatttcctgctgctcccggtaaaaacaggtctccggcagttcctgctgacaaatctgtacgaattctttgagatttttcaccggaatgacttttacggtatctaaaattgccgcttcccgggcattctcccacggcaccacaatcccctgcatgccttctttctgtgccagtactgctgcagacagtacgcctttggttggcaaaatactgctatttaatccaacctctccaagcagcagataattacttaaaatatgctcatccagaaaaccaaatgctgccagaacagacgctgccatgggcagatcacacccggtgccagattttcgcacatccgccggtgtcagattaatggtaatcttcttggctggcagacgaaatcctgcgtttttcagggcagtacgcacccgctctctggcttcctttacctctgatgtcaaaaatcccaccatatcaaaggaaggcatgccgtcactgacatccgtttctacctgcaccggaagcgactcaaagccacaaactaccgctgttttaattacactatacatatattcatttttcctcttttcgtatacggaaaaatccggcgattgccgaaaaaagtaaaaagtaagataaaagacatgtttactgtagcatatctgtaccaaaaagtccatcttgaaattcttcttccacatactggatatgttttgtaacggtcgaacagacacagggaatgatatctgccgcttttttcaggctctgacagcggtatactgccagaatggtctcaaggtgttctattttcatttacgctctccttcaagctgttactcttgaaatctttttctgattgtaacatatcttttctttgctattaagccgattatccatccacaaactcctgccgtaacttttccaatgccttcttctcaatccggctgacataagatctggaaattccaagacctttggcaatttcccgctgtgtggcaggttttgtgttgtacagaccgtatcgccgccgaatgatccagctttcccgctcatccagcaccttcggcaacagttcgtataaccgaagaatatttttcttttctaccacccgctcccacagctctggttcgccgctctctacgatatccagcaatttgatctgattgccttctttgtccgttccgataggctcataaagcgatacatctctggctgttttctttttactgcgaaaatacatcagcagttcattttcaatacagcgggcggcataggttcccagacggcttcctttttccagattgtaggttgacacggccttgatcagtccgatggttccaatggagatcagatcttccatatcttcctgcgcgccctgatatttccgtgcaatgtgtgccacaagccgcagatttcgctcgattaataccgattttgcctgctcgcttccgtttttcagctgctccagatactgcttttcttccaacgtactcagcggcgattgaaatgatttcaaatcggcacctccgtgtgcggcctttctattattctatgtcaggcaggcttttcccgtgtctgaaaatctgtgtggttttccggcaatcacaataatggggactagcatttatctaattttcaaaaaaacaagaaccagaaacgaccagttttctgattcctgcttttatgtctaagtatttatctcagtcgagaagactcccacttctgcaagtggtgagtaataacaagtctttctcagtgggagtacaatctccgactgagataaacgctccgcgggggcgcacattgtctgggagacaatggttttgcgccgaccggaacgaagtgtagatgtgcagtgattctgagaagaatatgtcagctttcgctgaccagaatcacgcaccaagtctcacgtgcgttcgacttgaatgcataaaaagtgagagggcactttgcttccttcttcttttctattcctttgtttcctatatggttgtactgtgtttgtatttaccttttcataaatatcattctgacagattatgctccacagatattctgtaacaattctgcaagttcttcttcgctggtcacacaatactccggttctaatccaactaccgtcgttttttttcttcggttaaaccagatggaatgccagccggcattttttgcacctgccacatcattttccggggaatccccaataaaataggcatcctctgcggtcagatgcattcgattctctgcataggtaaaaatttctttctgtggcttgttaattccaatctctccggaaacaaatacatgttcctctggaatccatcgttgtaaatctaacgcacgcaccttgtcccactggtgttcattgggaccattcgtaataacgccaagctgtacgttttccttctcacttaatgcctgcaacatcgcctgtatctgttctgacacttcaattttcccctgatattcctcataatacttctggaaagtcaatgcctgttcatcactgatcgctatgtcaaaatctgccagtgctttctgtacccggtaaatatacatttcttccatggtgatttttcccgtacaggaatcttcaaacacctcatcgctgtacactctgcttctggcaaacagtttatgaatgtcgatatcgttccgctcaggatacaaccggtaaaaagtcctggcaaaaggctgcacctgatcgtataatgtatcatccacatcaaataaaaatgctttcatatctgctgtccttcctgcatttcttaagctaatttcggatatttttagctattgataatcatttctttgtgttttttcaacttcctttgtttctgaaaaatttgatttcacaatgccgcacatttttccaattccgcgcagcacatgtccatttgccagatccaatactccgggaatcaaaccgccacgaattccaccgcagatcatcatggtacgcatcgggcttcccatagaagaagccagcatcatctgatactgcgcctcgttttcatcgataattgttccacccagagaacgccggataaaccaatctgctgctttatagaatacgcgcataaaccgcacatctttctgcatttcttccacagaatcttccatagtgtaggttcctttatggtgaggttttctctgcataactgcctgtatcacctcatctgataattgttttggcaaatgttctgtcgtttgatctggtattttttcagaaatcatcattttattaaactctgattgctttatgttatccgcacaatcgtcgttcttatcaaaatccaccgttccagcatgtatcgtctcagacaggcgaatatctctgctggatgtcccaagctctatggtatagcgtcctctcggactcttccacccgtcagcatatacacaaaaatcacgatctgtcaataaaaattgtacctgttttgtttctcccggcatcaaataaactttggaaaatccttttaattcccgcaccgggcggtgaatttcaggagtttttgcagatacatataactgcacgatttccttacccggaagcgccccggtatttgtaatatcacaggaaacgacatattcttcttttaaatcttttgtctgttttccaatatccttttgcaatcgttttatcttttctatctgattgtttttctgtaattgtctgatctgttctgatgattccggctcttgtattttcagattagaataagcaaatgttgtatacgataatccataaccaaaacaccatctcaccggtaactgtattttgtcataataccgatatccaacataaataccttcccgataaatagcatccttttctttgccataaaaagctgctgtggcacaatcctcataatttatcggccagctctctgccagttttccactcggattgacctttccatacaaaatatttgctatcgcctgtgcacctgcctgtccggataatcctgcatacaaaataccttttactttgcctgcccatgggcattccaccacgccaccgctcatcaaaatcacaatggtatttgcattttcttcagtcactgcattgatcaggcgtaaatgaccttccggcagtttcagagatccccggtcaaatccttccgattcataccgctccggcaatccgacgcataaaacaactttttcgcactgacgcgctgccacttttgctttctctaaaagtttctctgttgtatttccatatgcatcacaaccttctgcgaaaaccgtatgcggcagcacatcaacaagctgctgcaattttgttggattaatatgactgcttccggctccctgataacgcagattttgagccatatttcctatcagagcaacagtattttttgctacgtttgatgtatttgtttcactttttatacatgcatcagaatcaattgtttttaccatattttcaataggcatatcagcatcggctatttcttccatatttatcatagatacattcgaatcgtcatcaatttgttgcaatggcaaaatctgatcctcattcttcagcaatacaatgccttcctctgccacctgtctggcaatgtcatgatgcacttctgcatcatattttgaagatgccattttctccgctggagcttctctttcagttatcatctgatcatatccaactccagttgtttttctatcataaaccagtctattagcaacacattttttcataagatttaacacgcgaagggcactcgcatccactgatttttccgaaagaattccactttttactgcctgctctgtctcacgttccatataggcactgccacctggcatattcaggtcacaacctgcctgaaacgcttggatccggtcattcatcgcgccccagtccgttataaccaatccgtcaaatccccactcccgacgcaaaatatccgtcaatagtcgtttatcatcactacaatgcacgccattgattttgttatacgcacacataacggtcgacggatgcccttcttttacggcaagttcaaaagcataaaggtaaatctcacgcaacgtacgctcatccacaatgctatccgacgaaaaacgtttccattcctgtgaattgcaggcaaaatgctttagggataaagcaatgcctgccccttccatctccctaatccatcctgctgccagttttcctgccagataaggatcttcgctgaaatattcaaaatttctgccacacagcggattacgcttgatattcactcccggtcccagaacaatatccacaccataagcaagtgcttcttccgcaatcgtctgtcccatgatctccatcaattcaggattccacgtacatgccgttgttactgctgtcggaaagcaggtcgcctctctggaattatgtacgccaagcatgtccgcctttccctcctgtttgcgcagtccatgcggtccgtcacacatcatcagtgcctcgatgccatactgtttcatcgcttttgtgtgccagaaatcctgaccggaacaaagtgcaattttctcttttaatgtcattttttgcaggattgttttgctgtccattgccttttgcctcctaaaactaccatttactataaacggactgcggattatcgtcaatagaacacattccaatatcgttaagatcagcgctgatcttatttaaaacaaattatctaaaaacagattttatgcaatcttctttcctgtaattttcatcagatattttacctttgttttctatctttcccagacaactctccattacaaagtttttcaaaaaaatacagacatacacaactatgaaaaatatgtcaaatataaaaaagtgtcttcgacacttcaactcccc

SEQ ID NO: 13280 - DNA, 1646 bp, Unknown
  gut microbiota DNA sequence
tgatcaatgcattttcttcaaatgttgttccatcctcgacaatatccacgtcaattccggcttccttcatggaaaggatctcccatccaagatctcccagaatctcgtgaatctctctcattttatttttattgccagttgcaaaaataattctctgcttcatactgcctgtccctcttttctgtgattttacgtttccctgcatgcaaaatggttgcttttctatgcctctgtcttttttcttcttggcggcttcggtccgatatactgatacagatttgtccgcagcataccgttataaattttacgttttttgtctgctttctttccaatgctgcgttctgtatcctcataggaagtgatcagatactctgaccagcagtcaagtcctgcaaatgcctctccgatttcatgatacagttttggcagcgctgccttctcttccagacgttctccgtatggtggatttgtaataacaaagccatattttttcgggttctttaattcgctgaccggtctctgctgaaaatggatcaggtgatccactccagcacgttttgcattatctctggctgcccggataatctcaccatcaatatcatagccctgaatatttgtctcgatatctgtgttgaccatttcttttgcttcctcaaaacagtcatcccacaattcctttggaatcaggtttgtccaggtctgtgccgtaaacgtgcggttcattcccggtgcaatattcgctgcgatcatagctgcctcaattggaatcgttccacttccacaaaacggatctaccagaatacgatctgctttccatggcgttaaaaggatcatagccgctgccagtgtctctgtgatcggtgccttactgctcagcacacgataaccacgcttatgaagggattctcccgatgtatcaatgccaatggtcacttcatctttattcaaaaatacacgcagcggataggaagcaccagtttcttcaaaccagttcacctcataataggttttcaaccgctctacgatcgctttttttacaatagattggatatctgacggactaaacagtttacttttgaccgaagatgccttggttacccagaattttgcatctaccggcagataattctcccatggaatcgccttcaccgcttcaaataattcgtcaaatgtctccgcatgaaactcgcccactttcaaaagtacacgctctgttgtccgcaaatgaatatttgcacgacaaattgtctccatatcaccttcgtatgtaaccctgccatcttccactttgacaatgtcatagcccagatcgtagatctcacgctttaaaattgcctccataccaaaatgacaaggagaaataaactgctgtaactccatcttttctctcctgttattcttatttatcgttattgtcaaatttttatgtaaagcggacattttcaatccgctctcgctacctgctcatgaacgaaatcactttacgacctgcgttcaaaaacttgtttccttctattagttcctatcattataatcttttcttatttatgctgtcaatcatcagatctactggtatattttcaaaactgatacgcatccatgcctccggcaaccgaacaaattcgaaatccccgtttcacgtatct

SEQ ID NO: 13281 - DNA, 2155 bp, Unknown
  gut microbiota DNA sequence
ggatgaatggcagggaatcccacgcacccgcacctggtttttcaatattgtgcgaaaatttgatggttccgcatcatccggagaacaaacgaagcgttggaacaaggcaaacggttatcgttttctggaagaagcggtaaaaattgctccggtggtgcttggtgtcggcaatcatgaatggtatcacacggaagaagatttgcagttttttaaagatcatggggtggtttttctggataatcgggattgtgaactgacggtaaaaggacagaaacttctgattggtggaatgtccacccgatatgatctggaatggctggatcaattttcacaaaaagacggtgtgaagattctgatctgccatcacccggattattatccgaaatatatcaaagacacgaatcggaatacgtttgcgttgatcgtggcaggtcacgctcatggcggacagtggcgtctgtgcagcagaggcggaaggaaacgtggaattccggtttttgcaccgggacagggattattcccacgctattcttacggtcagtatgacaatatgatcgtcagcgcaggagtttccaatacggcgaatattccgcgttttgggaatccctgtgaggtggttatgattcagctgggtggaagttcaagcaataataaatgatgggaaaaattaagaagccatcagagtgccagataacaaaaaacttgcgcctgtataggtgccgggtaacaagaatgcgaaaagcagtctggaaggagatacggtgcattctggggataccgtgacgctttccatgcggcgagaccatctgctgtgtgggatacatcggaaaagtaggaatgcatcagacagataagaaaattataaaaatgatgctgaaataagcatttatggtatataataaataaagatgttgaaataaatgtttgtagatgataataggtgaaaaacttgaaacaaaatatttatgatttataaataaacgaagataccgaaatacaatgttcgtgatataggaaagaaatacggaggtacagaaaaaatgtacgattgcattattatcggaaccggtccggcaggcttatctgcggcactgaacctgaaaacatacaaaaaaagttttgtgtggtttggttccaaaagcttaagtgataaagtgcggaaagcggaaaaaatcacaaattatcccggatttccggagttaactggacaggaactgtttgcacattttgaggatcatatacagtcagcaggtctggagattacagaaaagacagtaaccaatgtcatgtcagagggaaattattacatggtgttggcggacaatgaaatttacgaagcaaaaacgctgattcttgccatgggtgtcatgacggcaaaactgttaaaaggtgaggatgagctgcttggcagaggtgtcagctattgtgctacctgtgatggtatgttttataaagataaggagattgcagtattatgcaacgatccgaaatacgagcatgaggtagaatatctggcagatctggcagcaaaagtaacgtattttccgctgttttctgacagtcaggtgaaaaaagagaacgtcacgatttccaaagactttccagtggaagtaaacggcattgaccgggtgacaggacttaccttaaaaagcggtgaaattttgagtgtggatggtgttttctgtctgcgtaatgcgatcgcactatcaaaactgattccggaattggaaattgagaacgggcatattgtggtggatcgtgcgcagaaaacaaatctgccgggctgttttgcagcaggagactgcaccggccgtccatatcagtatacgaaagccgtgggcgaaggaaatgtggcagcacatagctgtatcagttatcttgctgaaatagctgagtaaaatggatcggatagtatagtcaatccatgctatttatggaatcaatttttgctgcgtttatttacacattctccaactaccatgggaaaagggataaaacttgcgattatgtatttaaaaagtaaataaggtgtgctataatattaggctgtgatagactcttctgagtttttacagcctttttatttcatctcagtctgagatgagactcccacttctgcaagtggtgagtagtaacaagtatttctcagtgggag

SEQ ID NO: 13282 - DNA, 1881 bp, Unknown
  gut microbiota DNA sequence
aggacataaaatttgaaaaagagaatggtggcaattttattatgtgtagcaatggttgcagttagtctgacagcatgtggaaattctgataaggcaaacaataaagataatgtatctgtgagtttagatagtgaaactgatacttcaaataataaaaatagttcaaaatcggaacaaaaggaaaaacagatagactacattcaggcagagtatcgaatcatagatgcaaaagaattgtatgtgacagcagacaacatggaagcaacaacagattccgatggaaatgagacttatattaatacagaaaattatacaaatcaagatgtgtgtgacaatagagataaagaaacagtgttgcaacaattgatggcatcactatgtggcattgcaggtgccattgatttagatactgcaagaaatgaaggggtattcgataatgtaactgacgatggtgcaatggaaccagtagcgtttgttggcgttccgtgtacagatgagaatggagttacattaggtgatacagcaccaatatttcgaaaagtatttgaaaatgaagttttgaatgatctttttgcttttaagccggattatgagctggtagaggtagacggcgaagatgataaatggtataaatttacatggagtccggagacaacttatgaaggcatctatgcagaagcctatttgcaggagcttgccggtagaaaatctgagcttcaaactgctgtgaaagaagcaaacaatggcagcgatgcgattgaattaacagtgtctcctgagactgtggcaaaatgtctggataaatataatctggatgagggctactggtttgcatttaatgatctggaagattataatgcgaactcctggaattatgatgtgatttacgatggggttcgttatacatcaacagtgacaaatgataatgtaaaaatcatgctggaggtaaatggtgagccacaaactgtcattatgcaacaatggtatacagatctgttgttagataagaatccagaactgacgacaaaggaagaagtgttctttggcaatgaaaaatatcagagcattgcatattctgaaggaagaatgctgaaattggagcagaatcagaaagcagcatttgaagcatgcggatttaaaatagatgattatagataaaaaggaaagatactttttatgtattgctgatgccttctaaaacatagaaatatttaaaatcaatatgtggcggaatgggcgtagaaatgctatgagtctgcgagaaaatcaagatacattttgaaaaatataaaaacagggagaacaaaattatgacacgacaggagctgattgccagtatcgaacaatatcagccatataacgagcaggaagaaatggataaaccgctcattctggagtggataaaaaataacgacaatgcatttttacgcgaaaatgtcgtggcacatatgacggcatctgcctgggtggtaaataaggacagaagcaaagtactgatggtatatcacaatatttataattcctggtcatggttaggtggtcatgcggatggtgagatagatctgttatctgtggcggttcgggaagtgaaagaagaagctggtatttccaatgtgactccggtgtcgaaggatattttttcagtggaatcgcttaccgtagatggtcattggaaaaatgaaaaatatgtttccagtcatttgcattttaatgtgacatatttattggaagctgattcagaagaagcggtttcgataaaggcagatgaaaatagtggtgtggcatggtttatgccagaagaagcattgaaaaaatcaacggagccgtggtttgtggaacatgtatatgcgaaactcataaagaaagcggcatatacgattt

SEQ ID NO: 13283 - DNA, 41011 bp, Unknown
  gut microbiota DNA sequence
agtgcactgtttaaaaaagaaaccggacagaattacaaagcatatctgacttccatccgaatggaagaagcaatcaaactgctgatccagacagatgccaagacgtatgagattggtgaaaaagtcggatataacaatgtgcggcggtttgtggatgcgttcaagcagatttattccatgagcccgatggaataccgtaaaacctttcgggaagattaaagcgtgatgccctggtagtggaaaaatataatataaagaagaaaactatatcacagacatagaaattttgccttgtgatatagtttttttagtactgattaaattttgctacatagtggcagctataaacagatttacaattctgccaggtcattgcatcggggaaactctgttatttagattcccagcgaccggatgctccacatggaagaaccagtccgttggaagaaaccggaagtccgatttcatcagcagttacgataccgttgtattttttcataatggttccgagcatgtaagccagtactgctggttgaagtcctgttgtataagaattaatcaggaagaacagcggatcatcggagaggatctgtgtacacagttttaccagtgggtaaacagattcctcaattttccagatttcgcctttcggtcctctgccataagaaggcggatccataatgattgcatcgtagtggttgccgcggcggatctcacgctctacaaatttcacacagtcatccaccagccagcggatcggtctgtcactgagaccggaagaagcagcattttcttttgcccactgaaccattcctttggaagcgtccacatgagtaacctgtgcgcctgcagcggcagcagcaagtgttgccccaccggtataagcaaataagtttaatactttgatcggtctgcctgctttacgaatcttgtcaccgaaccagtcccagtttgcagcctgctctgggaataagccggtatgtttaaagctgaatggctttaagttaaaggtaagttcattgtaatgaatggtccactgctccggcagatcgaaaaattcccattcaccgccgccttttttacttctatgatagtgggcattgtgcttgtgccatcccttttccgttttcggggtatcccagatgacctgcgggtccgggcgaaccaggagatattttccccatcgctccagcttatcaccctgagaacaatcaatcacctgataatctttccagttttttgctatccacattgtctatttcctctactttctcaatgaaattgtctttgtataaaatgtgtttcttcttattatattataataatgtatgtgcttgtatgcgtttgtacaattctttatgattatagatgctactgctacgttcgtcaaggagataagcgatgtagcggaaatagaaaatgatcgtgtcttggtgtatgtttctcttcttcacgctttcttagcaatcatttttgtatcaaaaattaatgtatttataaaaatacaagaaaaatacgaatattttgaaaaaaattgaaaaaactacttgcaattccgaaagaaatctcttatactagctattgctgtgacatgatagcaatgaagcgcgaggttgctgcccgagtggcaggttttccgtggagcgaatgtcaagttaggaaactgacgacaagtcactgtactgaaactgaagaccatgaaatggttgaaaacaacgtgtgtgagattgaatgatacacacgggagagtgtacagtcaccgcttgtcgtactaatcaaaagtgcgaaaaggaggcgactttttttatggcaagtcaagtaatgagaatcattctcaaggcttatgaccacgagatggtggatgcatcagcaaagaaaattatcgaaactgtaaagaaaaacggatcacaggtgagcggaccggtaccacttcctactaagaaagaggttgtaacaatcttaagagcggttcacaaatacaaagattccagagagcagttcgagcagagaacacacaagagactgatcgacatcgtagcaccaacacagaaaactgttgatgcactgtccagattagaaatgccggctggtgtcagcatcgacatcaagatgaaaaacaaataattcatctggtaaaaagtcttccttatataataggaagcaacatgattaaggtaaaatcctgaagggttatatatagaagcagcattcttcgaatccgttttaacccacgttgcaaaacaacaatggattcaatgttccacttatatatcactgttctaggatgagcgcataaagcgctccgctgtagagtaaacaggaggtaaatgagatgaagaaagctatcttagctacaaaagtcggaatgactcaaatcttcaacgcagacggagttttagttccggttactgtattacaggctggtccgtgctacgttacacagatcaaaactgttgataacgatggatacagcgctgtacaggttggttttgttgacaaaaaagagaaagttgttacaaaagatgccaacggtaaaaaagaaatcaaacacagacatggtgttaacaaagcagagaaaggtcactttgacaaagctggcgtatctggtaagagattcgttcgcgagttcaaatttgacaatgctgaggaatacaaccttgcagatgtgatcaaagctgatatcttcgctgaaggcgacaagatcgatgcaacagcaatttccaaaggtaaaggtttccagggcgcaattaagagatttggtcagcacagaggacctatggctcatggttctaaattccatcgtcatcagggttccaacggcgcttgttcttctccgagtaaagtattcaaaggaaaaggcatgccaggacacatgggtagcgtaaaggttacagttcagaaccttgaagttgttcgtgtagatgctgagaacaatttacttttagttaaaggttccgtaccaggacctaagaaatctttagtaacaatcaaggaaacagtaaaagcttaagttttacttgattaggaaaggaggacacacagatggctaacgtatctgtttataatatggaaggcaacgaagtgggctccatggaactgaatgacgcagttttcggtgtagaagttaacgagcatttagtacacatggcagttgtacagcagcttgcaaataatcgtcagggaactcagaaagcaaaaacacgttctgaagttagcggcggtggaagaaaaccttggagacagaaaggaaccggtcatgcaagacagggttcaacaagagctccgcagtggacaggtggtggagtagtattcgctccggtaccgagagattactctttcaagatcaacaaaaaagagaaaagagcagctttaaaatccgctctgacatccagagtagaggctcagaaatttgttgttttagatgagttaaaattagaagcaatcaaaacaaaagattttgttaaagtattaaataacttaaatgtttccaaagcactggttgttatgggagacaaagatgttgttattgagaaatccgcagcaaatgtaccggatgttaaaacaacacaggctacactgttaaatgtatacgatatcctgaaatatgataccgtgatcacaacaaaagcagctgtagagaaaatcgaggaggtatacgcataatggcaaacgtacagtactacgatgtaatcctcaaaccggttattacagagaaaagcatgaatatcatggctgagaaaaaatatactttcctggttcatccggaagctaacaaagctatgatcaaagaagctgttgagaaaatgttcgacggcgttaaagttgcaaaagttaacacaatgaattgcgaaggcaaaacaaaaagacgtggaatgacttttggtaaaactgctaaaacaaaaaaagctatcgttcagttaacagaggatagcaaagatatcgagatcttcgcaggtctgtaagatatccacaaagcagtaggctaggcacagtaaagtgcgataataaaacacagtattgaaaggagattcattatgggaatcaaaacatataacccatatacaccttccagaagaaatatgactggttctgacttctctgagatcacaaagagcactcctgagaaatccttactggtttccttaaacaaaaattctggacgtaataatcagggtaaaatcactgttagacaccgcggaggcggagctaagaaaaaatacagaatcatcgatttcaaaagaaataaagatggtattccggcaactgttatcggtatcgagtacgatccgaacagaacagctaatatcgctctgatcagctacgctgatggtcagaaagcatatatccttgcaccggcaggacttacagatggtatgaaagttatgaacggaccggaagctgaggttcgcgtaggtaactgcttaccgctggcaaacatcccagttggtacacaggttcacaatattgagttacatccgggtaaaggcggacagctggttcgttccgcaggaatgagcgcacagcttatggctaaagagggcaaatatgctactttaagacttccgtccggagagatgagaatggttcctattaattgccgtgcaacagtaggtgttatcggaaacggtgaccacagcctgatcaacatcggtaaagcaggacgtaaacgtcacatgggtatccgcccaacagtacgtggttctgttatgaacccgaatgaccatccacacggtggtggtgaaggcaagacaagtatcggtcgtccaggtccatgcacaccttggggcaaacctgctcttggcttaaagacaagaaagaaaaacaaacagtctaacaaacttatcgtaagaagaagagacggtaaagcaatcaaataggaggtttaatatggctcgttcattaaaaaaaggaccatttgctgatgaaagcttactgaaaaagattgatgctatgaacgctgcaggagacaaacaggtaatcaaaacctggtcccgccgttccacaatcttcccgcagatggttggacatacaatcgcagttcatgatggaagaaaacatgtgcctgtatatgttacagaagatatggttggacacaagctcggtgagttcgtagcaaccagaacatacagaggacatggaaaagacgaaaagaaatctaaagtaagataattttggaaggaggttatatccatggcaaaaggacatagatcccaaattaaaagagagagaaatgcacagaaagataccagaccttcagcaaaattatcatatgctagaatgtctgtacagaaagcttgcttcgtactggatgcaatccgtggcaaagatgtaaaaacagctttagctatcgtaatgtacaatccgagatacgcatcaagcgttattgaaaaattattaaaatcagcaattgctaatgctgagaacaacaacggaatgaaagttgatgacctttatgtagaagagtgctacgcaaataaaggacctacaatgaagagaattcatccgagagcacagggtagagcttacagaatcgagaagagaatgagccacatcacaatcgtgcttaatgaaagataggaggtaaaacatgggacagaaagttaatcctcatggcttgagagtcggtgttatcaaagactggagttctaaatggtatgcagaaggcaattttgcagatctcttagttgaagattacaatatcagaaaatttttaaagaaaaaattatacagcgcaggaatcgctaaaatcgagatcgagagagcttctgaccgcgttaaagttatcgtttacacagctaaaccgggtgttgtaatcggtaaaggcggagctgagatcgagaaagtgaaaaaagagcttcagaaatatacagataagaaattaatcgtagatatcaaagaagttaagagaccggacaaagacgctcagctcgttgcagagaacatcgcagcacagcttgagaaccgtgtatctttccgtcgtgctatgaaatcctgcatgggcagaagtatgaaagctggcgttaaaggtatcaaaacatccgtttccggacgtcttggtggagcagatatggctcgtacagagttctacagcgaaggtactattccgcttcagacactgagagctgatatcgactacggtttcgcagaagcagatacaacctacggtaaagtaggcgttaaagtatggatctacaaaggtgaagtacttccgaaaaaggcagtggaagggagcgataaataatgttaatgccaaaaagagttaaaagacgtaaacagttccgtggcacaatggctggtaaagcgttaagaggcaataagattacaaacggtgaatacggtatcgttgctctcgagccatgctggatcaaatctaaccagattgaggcagcccgtgttgccatgacacgttacatcaaacgtggtggtaaagtttggatcaaaattttcccggacaaaccagtaacagctaaaccggctgagacacgtatgggttccggaaaaggtgctttggaatattgggtagctgtagttaaaccgggtcgcgtattattcgagatctccggtgtgtctgaagaaatcgctcgtgaagcgttaagacttgcaactcacaaattaccatgcaagtgcaaaatcgtttcccgtgaagacttagaaggcggtgaataagaatgaaatctagtgaatatttaaaagagttaagaacacagagcgctgctcagttacaggaacagttagtagctgcaaaaaaagaacttttcaatcttagattccagaacgcaacaaatcagttggataatactggaagaatcaaagaagttagaaaaaatattgccagaattcagaccgttatcactgagaaagcggagtaattcccctggcgagtaacccatgaaaggagaacgcatcgtggaagaaagaaatcttagaaaaacacgtgttggtaaagttgtaagcgacaagatggacaaaacaatcgttgtagctatccaggataatgtaagacatcctctttacaacaaaatcgtgaaaaaaacttataaattaaaagctcatgacgagaacaatgaatgtggtatcggtgatacagtcagagttatggaaacaagacctttatctaaagataaaagatggagacttgtagagattatggagaaagcaaaataagaaggaggctgccagcatgattcaacaggaaagcagacttagagtagctgataatacaggagcaaaagagttactttgcatccgtgttatgggcggttctacaagaagatatgctaacattggtgatgttattgtagctacagttaaagatgcaacaccaggcggagttgttaaaaaaggcgacgttgtgaaagctgtagttgttcgtactaaaagaggcgcacgtcgtaaagacggttcctacatcaaatttgatgagaacgctgctgttatcatcaaagatgacaaaactccaagaggaactcgtatttttggaccggttgcaagagaacttcgtgagaaacagttcatgaagattgtttccctcgctccggaagtattataggaggtaccgattaatgctgaaaattaaaaaaggtgatacagttaaagtaatcgctggaaaagataaagacaaagaaggcaaagtaatcgctgttaacgctaagaaaaatacagttactgttgaaggtatcaacatggttacaaaacatacaaaaccaagtatggctaaccaggcaggtggtatcgttcagcaggaaggaccgatcgatatttctaacgttatgtatgttcataaaggagcagctactcgtgtaggcttcaagatggacggcgacaaaaaagttcgtttcgctaaatcaactggcgaagtgattgattaatcaaagagaggaggtccatcaagttgagtagactgaaagacacatatcagaatgagatcgtagacgctatgatcaaaaaatttggatataaaaatatcatggaagtgccgaaacttgacaaaattgttatcaacatgggtgttggtgaggcaaaagagaacgcaaagattcttgaggcagctatgaaagatcttgagatcattgcaggtcagaaaccaattacaacaaaagctaagaattccatcgctaacttcaaaatcagagaaggtatgccgatcggatgcaaagttactttaagaggcgagaaaatgtatgagttccttgatcgtcttgtaaaccttgcattaccgcgtgtacgtgacttccgtggcgtaaacccgaatgcatttgacggcagaggtaactatgcacttggtatcaaagagcagttaatcttccctgaaattgagtatgataaagttgacaaagtaagaggtatggatatcatcttcgttacaacagctaacacagatgaagaagcacgcgaattactgacacagttcaacatgccattcgctaaataacaggaggggactttaatggctaagaaatcaatgaaaatcaaacagcagcgtacaccgaaattctctaccagagcatatacacgctgcaaaatctgtggacgtccgcattctgtattaaagaaatatggtatctgcagagtatgtttccgtgaattagcttacaaaggtgagattccgggcgttaagaaagcaagctggtaagatacacttaacgaaagcaagctgaatgaaaatattacaggaggaaacacaacatgacaatgagtgatccaatcgcagatatgcttacaagaatccgtaatgcaaatactgctaaacatgatacagtagatattccttcatccaaaatgaaaaatgctatcgcagagattttattcaacgaaggatatattgcaaaatacgagatcattgaagatggtaatttcaaaacaatccgtgttacactgaagtacggtgctgataaaaatgaaaaaatcatcacaggtatcaagagaatctccaaaccgggtctgcgtgtatatgcaagcaaaaacgagatcccgaaagttctgggtggtttaggaacagcaatcctttctacaaaccagggcgttatcactgacaaagaagctagaaaacttcaggttggcggagaagtattagcatttgtatggtaggccggaagccacttagcgaaatcaagccttcgggcgcagattgaggttagtgcgaggtccttctgtgagattagcaaaagcaagccataggcgcagcttgagcttagcgaacagaagattcccgtggaaatgttcaggagccagaatatggcttctgacaaacatccttaatttctcgatgagagagttaagagactgctttacagacaatgctgtaaggtggtaaaatctataaacgatccaaaagtataattccactgcaaaggtggaacatactgtgtaacaatgcatgtcggcagatgtcgaccaatacagaatataggaggtacgggcatgtcacgtataggaagaatgccaatcgcgattccggacggagtaaccgtaacaatcgcagaaaataatcaggtgactgtaaaaggtcctaaaggaacacttgagagagtgttacctgcagagatggatatcaaacaggaaggttctgagatcattgtaaccagaccaaatgatttaaagaaaatgaaatctttacatggtttaacaagaactctgatccacaacatggtaatcggtgtaacagctggttacgagaaaacactggaagttaacggtgttggttacagagcatccaaatctggaaacaaactgacattaaaccttggatattctcatccggtagagatgattgatccagaaggcttagaggcagttgttgatggaaacaaaatcattgtaaaaggtatcgataaagaaaaagttggccagtacgcagcagaaatcagagataagagaagacctgagccttacaaaggaaaaggtatcaaatatgctgatgaagttatcagacgtaaagttggtaagactggtaagaaataattggaggtgtgacaggtaatggttagtaagaaatcaagaacagaagttcgcgttaaaaagcacagaagagtgcgtaatcatttagcaggtactgctgaaagaccacgtttagctgtttttagaagcaataatcatatgtacgcccagattattgatgatacagttggaaacacaatttgtgcagcttctacaatggataaagacattaaagcagcttgcgagaaaacaaataacgtagatgcagcagttcaggttggtacagcaatcgctaagaaagcacttgagaaaggaatcacaactgtagtatttgacagaggcggtttcatttatcagggtaaagttcaggcattagcagacgcagcacgtgaagctggattaaacttttaacaaggaggaaacaatacatgaaacgtacaatcattgatcccagccagttggaattaaatgaaaaagtggtatcaattaaacgtgtaaccaaagttgttaaaggtggacgtaacatgcgttttacagctttagtcgtagtcggcgatggcaacggtcatgttggtgcaggtttaggaaaagcagctgaaattccggaagcaatccgcaaaggaaaagaagatgcaatgaagaaactcatcgaggttaaattagacgcaaacaacagtattacacatgatacaactggtaaacatacaggtgcatctgtattattaaaaagatctccggaaggtactggagttatcgctggtggcccggcacgtaacgtgtgcgagctcgctggtatcaaaaacatccgtacaaaatctctgggatccaataacaagcagaacgttgtacttgctacaatcaatgcgctcagccagttaaaatccccggaagaagtagctagacttcgcggtaaatccgtagaagagatcctgggttaaggagggatataagatggcagataaattaaaaatcacacttgtgaaatctacaatcggtgcagttccgaaacatgttaaaacagtagaagctttaggtttaaagaaacttaacaaaactgttgaaatgccggataacgcagcagttcgtggtatgattcagcaggttagacatttagtaaaagtagaagaaatctaatagtaaggaggtgccacgatggatttatcaaacttaagaccggcagaaggttcaaaacacagcgataacttcagaagaggccgtggacacggttcaggaaatggtaagacagcaggtaaaggccataaaggacagaaagctcgttccggagctccaagaccaggctttgaaggtggtcagatgccattatacagaagaatcccgaaaagaggattcacttgcagaaactccaaagagatcgtttctgtaaacgtatctgctcttgagagatttgagaatgatacagttgtaactgtagacactctgatcgaggcaggacttgttaaaaacccgagagatggtgttaaaatccttggaaacggagaactgacaaagaaacttacagttcaggcaaacgctttcagtgcatcagcaaaagaaaaaattgaggcacttggcggaaatgcagaggtgatctaatgcttgaaacagtccgtaacgcatttaagctcaaggaaatcagaagccgtatcatttataccctgctcatgttagtagtggtacgaatcggtacgcagcttccggttccgggagttaatggaagctatttctcagaatggttttctggcaattcaggcagcgctttcggattttttgatgcaattaccggcggttctttcgagaagatgtcggtatttgcattgaatattactccatatattacgtcttctattattatccagcttctgaccattgcgattccaaaactggaagagcttcagaaagacggtgaagaaggtcgtaagaagatgactgcaattacacgttatctgacagtagcacttgcattaatggaatctcttgctatggcaatcggattcggcagaagtggacttctgatcaaatttaatgctctgaatgttattacagctgtcgtaacattgactgcaggatctaccgtaatcatgtggatcggtgagagaattacagagaatggtgtaggaaacggtatctctatcgtacttacaatcaacattatctcaagaatcccacaggatcttacattattatttgaacagtttgtaaagggaaaagaaattgcattccaggtactgaatttggcaattattattgcaattatcattatagtaacagtcttaactgtcgctttacagggagctgagcggagaattccggtacagtattccagaaaagtacagggaagaaaacaggttggtggacagacatctcatattccgttaaaggtaaatactgcaggtgttattccaatcatctttgcacagtcattattcatgttcccactgatcatcatgcagctgcttggtaaatctggtggaaacggaattggcggtacaattcttaaaatgttaaatcagtccaattggtgtgatttcaatgaaccgatatactctataggattaattgtatatattgcattagttattgcttttgcatatttctatacatccattacatttaatccgttggaaattgcagacaatatgaaaaaacagggaggctttatcccgggtatccgtccaggtaagccaaccagtgaatatctgacaaagatcttaaactacatcatttttatcggtgccgtaggtctggtaattgttgcagttattccgatcttctttgagggagcattcaatgcatcaatttcatttggtggaacatctctgatcatcatcgttggtgttatcattgagacattaaaacagattgagtcccgtatgctggttcggaattataaaggatttttaaatgattaatgtactgttggagatacttgaaattacaggtatctcctattgtgctttataaatgttttttagtattttcaaaacgaagcaaatcctgtacaatagagagagcagtaagggaaaggctcatatcggaggaggaagaacaatgaaaataattatgttaggggcaccaggtgccggcaaaggaactcaggcaaagaagatttcagataagtttgccattccacacatttcaacaggagatattttccgtgccaatattaaaaatgatacagagcttggaaagaaagccaaaacatatatggatcagggactgttagttccggatgaactgacctgtgatcttgttgtagaccgtatttcagaagatgactgcaaaaacggattcattctggatggttttccaagaacaatcccgcaggcagagtgcctgacagaagcattgaatgcacgtaatgagaaaatggattacgccatcaatgtagatgtgccggatgaaaatatcatcagcagaatgtctggcagaagagcatgcttaaactgtggtgcaacatatcatattgtaaatattccgaccaagaaaccgggaatttgcgaccgttgtggagagccggttgtacttcgtgatgatgatcagccggagacagtaaaaaaacgtctggatgtatatcatgcacagacaaaacctctgatcgattactatggcgatcaaggtatcttgaaaacagtagacggcactcagccgatggagactgtttttgaagaaatcgtgaaaatgttagaagcttaatgctccagaatggaggaaaacatgtcagtaactattaaatctgaacgtgaaattgagttgatccgcaagtcttgccatatcattgccaagattcatcaggatcttggtaaagagctgaaagcaggaatgtccactctggaagtagacagcatggcagaagatatgatccgaagctatggctgcgtaccgaactttaaaaattatggtggctttccgggttccgtgtgtgtatccatcaacaatgaggtagtacacggtattccatcagcaaaaagaatcattcaggacggtgatattgtaagtcttgatatgggttgcatctacaaaggttatcattctgatgcagcaagaacccatgcaatcggtgaggtttcagaagaagccagattactgatcgaacgtacaagacagagcttttttgaaggtattaagtatgcgaaagcaggaaatcatcttcatcagatttccaatgcaattggtgcatactgtgagaaatttggttatggcgttgtaagagatctggtaggtcacggtgtaggctgtgagctgcatgaagatccacagattccgaattttactcagaaaagcagaggtatccgtctgcgtccgggtatgacattagcaattgaaccaatggtcaatgcaggtcgttatgatgtggagtggaccgacgacgactggacagttatcacagaagatggttctctttcagctcattatgagaatacaattctgatcacagacggcgagccggagattctgacactgacagaggatgagcgtgttctgatgcagaatggaggactgggatgcgagtagaactggcattgtcactggcaggacacgataaagggcattactatgtcattttgcgtgaagaaggagattttgtctatgtagcagatggcattctgaagctgtgtgaacagccgaagaaaaagaactgcagacatattcaacggattaaaagactgccggcagaggtgacagaacttcttttaaatcaggaagatcgaaacgatctgaatgtaaagcgggcactgaaactgtatcaacagcgtatccaaaatacagtagaacaataacaggaggcaaatcaatgtcaaaagcagatgtaattgaaatgaccggaacagttatagagaaacttccgaatgcgatgtttcaggtagaattagagaatggtcatcaggtacttgctcatatcagcggtaaattacgtacaaactttattcgtattttaccgggagatcaggttaaagtagcactttcaccgtatgatctgacaaaaggcagaattacctggagagataaatagaacacggaacttgtaagtatttgtttttatacaaaaagagtataaaaaacttaaaaaacatgttgcaataaggaatactccatgctataatacccaatgacgcttttggagaaccaagggaatattatgtatattgcctggcttctattcacaaaacgaaaaggctttatagtatggagtttttttgtttaaggaaaggaggatttgctgtgaaggtaagatcatcagttaaacctatttgcgaaaaatgcaaagtaattaaaagaaaaggaagcatcagaattatctgtgaaaatccgaagcacaaacagagacagggttaatcattctttaaatagatgatgagagcaggttggagacaacgcgaaactgctaatccgttcctccatggagcactctgccacagagtaccaatttggaacaggatctgtttgaatcagaagggattacagcgtctcctgaaattttccggatgtgcggctgcagcaagattccctctgaattttgctgttcatggcggaagataaaacgacactgtaatgtttctataatatagaagcattaatgaacagctgatacaggttgtgcacacatttcaggccgggtaatccggagctgcataaaatgtatcgggatgtaactaagaaaacgaaatcattatggaggtgtaaacacacatggctcgtatcgcaggtgtagatttaccaagagaaaaacgtgtagagattggcttgacttatatttatggtattggcgttgcaagttccaatcgtattcttgcagaagcaaaagttgatcctaatatccgctgcaaagacttaacagatgatgatgttaagaaaatcagtgcagtaattgatgagtctcagacagtagaaggtgacttaagaagagaagttgctatgaacatcaagagacttcaggagattggatgctatcgtggtatccgtcacagaaaaggacttccggttcgtggtcagaaaacaaagaccaacgctagaacaagaaaaggtccgaagagaacagtagcaaacaagaaaaaataatgcattgagatagagaggtcgtccatgggacagaccgcaatacattttgacaaaaatctgtagaaagtaggttagtttaattatggctaagaaagttacaaagaaagtgactaaaaagcgtgtaaagaaaaacgttgaacgtggacaggcacatattcagtcttctttcaataatacaatcgttacattgacagacgctgaaggcaatgctttatcatgggcaagtgccggtggtcttggatttagaggttcaagaaaatctactccttatgctgcacagatggcagcagagactgctacaaaagcagcgctcattcatggtcttaaaacagtagacgtattcgtaaaaggaccgggttcaggaagagaagcagctatccgtgctctttccgcaagcggccttgaagtaacaagtatcacagacgttactccggtacctcacaacggttgtcgtccgccaaaacgtagaagagtctaattaggaggtgtagtctgagatggcagtaaatagagtacctgttcttaaaagatgcagatcccttggtatggatccgatttatttaggaattgataaaaaatcaaatagacagtcaaaaagagcaaacaagaagatctctgagtatggtcttcagttaagagaaaaacagaaagcaaaattcatctacggagttctggagaaacctttccacaactactatgagaaagctgatagaatgaaaggcatgactggtgcaaacctcatgacaattcttgagagcagacttgacaacgtagtattccgtcttggattagctagaacaagaaaagaagctagacagatcgttgatcacaagcatgtattagtaaacggcaaatgcgtaaacattccgtcttacttagtaaaagctggtgacacaatcgaaatcaaagagaacgctaaaagctctcagagatataaagatatccttgaggtaacagcaggccgtctcgttccggaatggcttgatgttgatcaggagaacctgaaaggcgaagtaaaagagttaccgacacgcgagatgatcgatgtaccggtagacgagatgcttatcgtcgagttatattctaaataatcatgtaggcaacgagcagtgccgaatttgcacaaaaatcagacgcttcatggcatcatgcaggcggatgatttttgtgtcttaaaataaaagcactgattagtataaaatttaaggagggacgtacagtgttcgattttgaaaaaccaaaaattgagattgctgaaatttcagaagacaaaaagtatggcaaatttgtcgtagagccgctcgaaagaggttacggcattactcttggtaattccctgagaagaatcatgctttcttcattgccgggagcagcagttagtcaggtaaagattgatggtgttttacatgagttcagctcaatcccaggtgttaaagaggatgttactgagatcatcatgaacatcaaaaatttggctttaaagaataccagtccaacaaatgaatctaaagttgcttacattgaatttgaaggtgaaggcgttgttactgcagctgatatccaggctgatccggatatccagatcatgaatccggatcttgtaattgctcacttaaacggtggggtagattccaagttatacatggaactgacaattacaaaaggacgtggatatgtaagctcagataaaaacaaaggcgaagatgtaccaatcggcgttattgctgtagatgcaatctacacaccggttgatcgtgtaaacctgacaattcagaatacacgtgtaggtcagatcactgactatgataaacttacattagatgttcatacaaacggaacacttgagccggatgaggctgtcagccttgctgcaaaagtattaagcgagcatctgaatctcttcatcgacctgtctgagaatgctaagacagcagaagtcatgatcgagaaagaagacaacgcaaaagagaaagttctggaaatgaacattgatgagcttgaattatccgttcgttcttacaactgcctgaagagagcaggaatcaacactgttgaagagttgacaaacagaacaccggaagacatgatgaaagttcgtaatcttggacgcaagtctttagaagaagtactggcaaaattaaaagagttaggcttacagctcaatcagggcgaagagtaattcttttatataactcattaagcggcagaggatataagaccgatgtgcgttaatctgtcgtcattcatgagtggaggaatatcaacagggcagacaacaaaacgtctccccgcatcacattcggtatctaagtccaaagagcgttgccggatgaaccacaataatggagggctattaaaatggcaaaatatcgtaaattaggaagaacatcttcccagagaaaagcattaatcagaagtcaggtaactgcattacttcacaacggaagaatcatcactacagaggctagagcaaaagaagttcgtaaagtcgctgaaggtctgatcgcatctgcagtaaaagagtgcgataacttcgaagaagttactgtaaaagctaaagttgctcgtaaagacagcgaaggcaagagagtaaaagaagttgtagatggtaaaaaagttactgtttatgatgaagttgagaaaacaatcaagaaagatatgccgtcccgtcttcatgcaagaagagagatgctgaaagttctttaccctgtaacagagacaggcgcaaagaaaaaagatactaaagaagttgatttagtagataaattatttacagagatcgcaccaaaatacaaagatcgtaacggtggatacacaagaatcgttaaaatcggtcttcgtaaaggtgacggagcaatggaagttgttcttgagttagtataagatttacagagtacttcatggagtcatacgaaaagaaattttcgtatgacttcttttttttgtgtaatttaaaaatattttgcatggaagtttgcataaaaaccttgttaataaattgttgatgatccacagtacttgtgcaccatgctacgaaagaccattcaaatgtcttcataaagtatgcggattgcacatttccaattggtaacaagtgatcgaaatgatacattaataagtttttgttattataaggtagcttttttctattggaaatgtattaaatcatattgtattataagcatgtgcttgagaaagtacaaaacatagggaataaataattaataaagggaataattggaaagaacggagggaattcatatgagaagtacggaaaacaaaaaagtaactgttacagctgcagacagcaaatatcgttgtaacttatgtggacaccttacaaacaattttggccgtcgttgcccacagtgcggaacagtgatttctgtttatacagcaacagacgtaacctttgatgctacttcataccgataagaagcagcacaacaaattagtaattttcaaataccaacataaataccaaaccttcatgttcgtgtagaagggaagctacacgattaaaacctaactctttatatactttgtccgaagtatgaaacagaaaaaagaagcggaatgaaccgcttctttttttgtgcaatttatatgcaatatttttgtacacttatactattcctttattacagtgcggacaggtcaagtttgtcaaaatcttccaccagactctgtgcaatccctgtgatgatctccagatcacgtactgtctgtccttccagatttaaaaccataaccggatcatgcagagaggctctcagaagcatccagccggtacatacaccagagaagcggattcttaccccttcataggcagttggaagctcaaagccggactcagaagctctggtcttgaactctgccagtacacgggagccatagctgtggaaatcctctgtaagaatcggaaaacgtacttcacggtcggcatattcggtgctgagaccggaaatgaaatgatcaatagtttttccttcacgtttcgctttagcgacggcaatcaccagtttgacagccagataagcgccgtcatccagataataattctctttcaggcagccgtgaccggaagtctccatagccagtgggcttacaatgcctttggcattgagttccttacatttgttgattacatttttgtaaccgcgcatataaggcagatgcttcagaccaagctgattttcaagaaagtcagtcagacggtcggaagtaacggaatccgtgataatggtgctgcccggataatccggcgccagaatagctgcaatcatggcgataatggaatcacggttgatcggtgtgccatcggacaatacagcagacatacgatctacatccgtatcaaagatcagaccaaggtcagcaccagcagcaacggttgcgtcacagatggctttcatagcgtctttgttttccgggtttggaatatgatttgggaacataccgtccggatcaaggaaattgcttccgattgtgtctgcacccagttcatttaatacttcatttacaaagaatccaccggcaccgtttccggcgtctacaacaatctttaatccttttaatggttcgtcataattttcggcatttacgctatcacagatcttcatacacagatttgcactgtaaagtgagatcagttcaaactctgtcagacggttgcagtctgtcggcaatggtctggtcagtgtgtctgatgatacctgctctgccagtcctgcggcaatttcaagaatggcagtaatatcatcgtgctccagtccgccgtctttgtcaaaaaatttcagtccgtttctgttaaacggaagatggcttgctgtgatcatgcaggcaccatcgtaccgggtttccggatatacgatggacatgaacatggcaggtgtggaagccatgccacagtcggatacgtagatgccctcgtctaacatacccatcatagcctgctttttcagctcaggaccggtgattctggagtctgtaccgataccgatgatacattcgtccggcttgatatttttctttttcagaagccagatggcgaatgcacgaccgattaggtacgctgcctcggaagtcagtgtgacatgctcattttcgatgccttcacacgcgatgccccttacatcgctgccgttctgcaacttcagtaattcagttttactcattgacataaaatgatttgctcctttttattctttttcagattgattataattcagtcgcgtatggaatacaagagagaatgaaagagagaaaaataggagtggtttataagcgaatttgcctactattttttacaaatataaaatctttataaaaaatgctaaaaaagtataaaaacgattcaatttttctcaaatttgatttgttattaagtaactgcttggtaactcaaaaaaagaggagtataatacaatgcatagttcaaggtagagaaaggagaggggactatgtttaaaaaatttacaaatggctgtgtaaaactcgtacagcgattccttcctgacgcattcgttttctgtattatcttaacgattgtcgtatttatcgcagcaatgccggtagcaggtatgaatccgatcgaagttgcaaacgcctggggatcaggtgtatggggactgttagcattctccatgcagatggcactggttcttgtacttggtagtgcattggcaaacgcaccggctatcaagagaattattgtaaaacttgctggagtaccgaaaaaaccagcaggagcagttgcattcgttacaattatttctgcaatctgctgctttattaactggggatttggtctgatcatcggcgcattacttgcaaaagaagtagcaaagaagatcaaaggtcttgattatcgtctgatcattgcagccgcttattcaggattcgtaatctggcattcaggaatttccggatctattccgcttggtatgacagctctcgatgttgacggaactgttgcaaatacaggtggagcagttacagaggttgttcctacatcacagacaattttctctgcatggaacctgatcatggttgtagcagtagtagttgttgtcgctatcgtaaatgcaaaaatgcatccggatgcaaaagatgttgtttccatcgatccgaaacttctggaagatgcaccggaagcagttgagacaaaagcgaaaaaagatcgtacaccggctgagaaacttgagaacagtatgattctttcttatatcgttgttgtaatcggagcagtttatctgatttactatttcgtgaatgcaggttctattctgaacgcattatcactgaatatcgtaaacttgattttcttaatccttggtattgcattccataagacaccgatcggttatgtaaaagccatcatggagtctgcagagagtgctggtggtattatcttacagttcccattctacgctggtattcagggtatgatggttaccgcaggttcaaacggcgtatcccttgcatctgcaatcagtaatggatttgtaagtatttctacaccgcgtacattcccggtactgtgctacttagcagcaggtatcgtaaacttcttcgtaccgtcaggcggcggacagtgggctgttcagggacctattatgatgcctgcaggattaaaacttggcgttacaccagctgttacagctatgggtattgcctggggtgatgcatggacaaacatgctgcagccgttctgggcacttccggcacttggtatcgcaggtctgggtgcaagagatatcatgggttactgtgcaatcgtactgatcgtatccggtatcgttacagcacttggattcctgttcttagtaccattattggcataggaagaaataatttttagaaagtttgttttttaacgtatggaaaatgtaacaattatcagtcacctgaccccgcgtgagtggaaaatgtcgtgggaaaataaggttgtggaagattcaagagagaatatgcgtgcgtatcagcagcagaattgcttttggggacattttaagaatgacagggactttacgatctgccatcacaaagagtttgaaattaaaggtatgagtcttggactttactttaatggaacaatcgaagatgatgagcgtggttgtaagattgttggtaaattcggaaagaagaaaacagcaaatctgtttcttggaatgggagcagcgctctgtatcgcagcaatatttggagcaatcgcacgtcaggatatggaagtatccattgtcgcgactgtattgcttgccattttactgattgtctattttgcaaagccacagaagggacagaaacggattctggaccagctggagaaaatatcctttgataataactatcatagaaaggtgagtaaaaaagcaaaagcagatgtgaagaaaaaacgaaccatgcgggaaaaagcaatggtgaatgtggagtaaaaaggaaaacccgaacagatcagaaatgaactgttcgggttctttctttgcttgattggaaattatgctgaatttcttattaaacgcttgattatctatacaatctgccggtcataagaagtaagtataaatgttcacaaatctattgcaaggagaatgagaagaaattaattttcattctctgcataagggagggtgaagataaattcggttcctaccccttcggtactgatgacattaatattttcatggtgtgcatgaatgatctcttttacaatggcaagaccaagtccggtgccttttttatcttttccacgggatgcatctgtcttataaaaacgttcccagatacgtccgatgctgtctttgggaataccaatgccgcgatctttgacggatacaaatacctttccgtttcgcagcgtagtttcaatcgtgatggcggaatctgcattgctgaatttaaaagcattgtcgatcagattgtgcataacctgatcaatttttgcggaatctgctttgacatacagttcgtctccggtcaggatcaggtcaaaggaaaggcgcttttctttacagcgtccctcaaacatcagtattgttcgtttgatgagctgattcagatcaaatacggtcagattcaggtacgtgcctttagaaccatatttattcaattccagaagactttgcgtcagcttttccagacgttctgcttcaaaaatgataacgtttaaatatttttcctgtaactccggtggaatcgtaccatctgccatcgcctgtgcgtaacctttgatggatgtcagtggagaacggaagtcgtgagacacattggaaacgaatttgtgctgatcgttttcaagtgcatccaattccactgccatgtaggttaaagtatctgccagtgttccaagttcatcctgccgatgcaactccagtttggtttcaaaatcgccctctgcataggagacagcggctttacagatcgtattcagtgggcggtaaacggtaaagaagaataccaccaaaatgatcatggccagcagtgccagaaaaatcagggacagataataactgttcagtaagccatattgcagatctgaaatgtggctcagtggctgacagatcaggacataacagcttacactgtaattatgagtgaccggcgtataaacacttagcacatcggaatcataaaggttgtaaaaatggttgatattataataatcgcttccaaaatccagaatgtcaaaatccgggatcatttcggagtcagtggcttcccaggattcggtagaagtcacaagaattttcccgtcggtatccacgacataaatatctgcattcaggtagctgcctactgcataaagctgtttttgaaactgtgtcagcgtcatatcggaactgtaatagttggttccaaaggacgtggcgatcaggttactttcccggcgtagagcagaggcaaaatgtttttcgagatatttctgattgtaacgggcagtaaaggtggatatcataataaatccaagcactgcaaatacaagataagaaaatatcatcctgaaaagtattttatgtttcatatgaaataaatgcggttagcggcgttcgaatttgtatccgatgccccataccgttgaaatcccccaatgttcgtgatctttgattttttcccggagacgtttgacatgtacgtcaacggtacgtgtgtcgcccagatattcatagccccagatgttgtccaaaagctgttctctggtgaacacctgatttggagaggaagcaaggaaatacagaagttccagctcctttggcggcatgtcgatgatctgtccgtaatacatgacagagtagttggtcagattgatgaccagatccggatattccacacatttgatctctggttctgccttttccggtttcatgacctgatagcgtctcagcactgctttgactctcgcaactaattccttagaatcgaatggcttgatgatatagtcgtcagcgccaagttccagaccaagtactttgtcaaatacttcacctttggcagaaagcataatgatcggtacgttggactgtgtccggatctcacggcagacctgatatccgtcgatgcccgggagcatcagatccagtaaaatgagatttggctgataagttttaaattcgcgcagagcggattctccgtcttctacgatcttcgtatcataacattctttcagcagatacaatgagatcagctcagcgatattggcatcgtcatctacgatcagaattttctgtttgactgccataattttcctcctattcgaattcggcgatcgttacaccggcatcaccttcgccaaattcgccaagatgataagattttacatatttttgtttctttaaatggttctgaaccgctttgcgcagcgcaccggtaccttttccgtgaacaatacgcacggtttttaaatgtgccagataagcgtcatccagatatttatccagttccattagagcttcatctacggttttaccgatcaggttgatttctggagaaacggataatgattttgccattttcagcttgccggcgccggtttttgtgttttgtacaaccggagtggcatcttcgtttaacagaacaagatcgcggatattggtctgataacgcaggataccagcttgcacgaacagatttcctttggcatccggaagggtgtgaacggttcccttcaggttcatgctgagaatcttgacggaatcccccagacgcagcttcttcggaacgttgtggttgacggcagctttctttttcatggaagatttggactgagctttgtccagtttcttgcggactttttcacggtctttttccatggcagcagcatccacatgagttttgccatatttatggaagtggcggatggtttcgtctgccagatcttttgcttcttttaaaatagcggcggcctgttggtttgcttcctgtaaaatacggtcgcggctgcggtttaatttatcctgtttttcttctaattgtttctttaaagaggcagcttcctgtttgtaacggttgatctctgcctgttctttttcaatggtgagacggctctgttccagatcagcgatcacgtcctcaaaactttcattttctttggtaatgcgtgttttggcatcttcgatcagatcagaaggaagtccgatcttgctggaaatggcaaaggcattacttttgcccggaataccgatcagcagacggtaggtagggcttaaggtctgtacgctgaattcgcagcaggcattttctacaccttctgtggagagtgcgtaaagcttgatctcactgtagtgcgtggttgccatggtgcgaatcttatcctgacgaagacggtcgagaatggaaatcgcaagggcggcaccttcatccggatctgtaccggcacacaactcatcaaaaagaacgagggagtgcggggtagcatgtttcaggatggaaacgatgtttgtcatatgagaagaaaaagtactcagactctgctcaatactctgttcatctccgatatctgcatatacatcatcaaaaatagcaagttcggaacgatcttttgccgggatgtgaagtccggcctgtcccatcagggtgaacagaccgacggtttttaaggaaacggttttaccgccggtattcggtccggtaacgatcagcaggtgaaactcatcgcccagatgaacgtcgatgggaacgacttttttcgagttcagcagcggatgtcgtccctgacggatccggatacgtccttccgtgttgaaaatcggagccataccgttttggatttttgccagattcgcctttgcaaaaataaaatcgagatccgtcaggatatggtagttatccatcagaaaatctgaatactgagcagtcagattactgagttctgccaaaacggcttcaatggcttcctgctcttttaagaatgcttcttttaaatcgttatttaattttacaacggacatcggttcgataaacagggtggaaccggtagcggactgatcgtggatcatgcccggaacctgtcctttgtattctgccttgaccggcagacagtaacgaccgtttcgcatggtgacaaccgtatcctgtaaataagaacgggtggtggaactgttcaacaaactgttcatggcaccatggatcttgtcattgatattgcggatggtccgccgcacactgtgcagagccgggcttgcatcatcactgatctcatcctctgctaaaatacagcggcggatttcttctaaaagcggtgtcagcggctcaagtcttgcaaacatatcatccagcgaatcctttggcagatcgtcacggttttctctggaataagattttgcgcgtttcgtaatctctaacaggttacagacagacagaagttcggcagcgtttaatgtaccgccgatttccagtcgtttcatctgaaatcccggatcttttaagccaccgaaagtcagattgcctttgcggtagatgcgggaaagtgcatccgatgtctgtgtctgtgcctgtatgatatcctgtttgtctgtcataggcttcagttcgagacagcgttttttgccggcatcggaagtcgcctgatctgcaagcaggtgaatgattttgtcatattctaaaacttttaatgctttttgattcatatgtcctccataacataaacaacataaacgaaattaagtcgctattatttatattttaacgcataatcaggaaagtgaaaagagaagattgcattaattttgctatggtattggcactgtggaagaaatagttgcataagaattacagaaaacgtataatagttccataagacttatatgctgagggcgttccggaatgtgtggacgctgaaatgattcggaaaggtgtttgaccatggataagaaaaagcaggaagaatatcattttgtaaaagagcatatcaagaaaattccgccggatcgaaagaaacggagaatgagtctgggatggacgattcttctggcagctgtgttcggtgtggttgctgcactggtgttttgtgctgtaaaaccggcaatcgagcggctgtttcagtccaaaaatgagcaggtagtattgtccagtgatgagacaaaagaagcggatactgctgatgaaccggtatatattacagaaacgcagcagatggatctgaatgattatcagattttgcaaaataaactgtatgcggtgggacgggaagcgaacaaatccgtggtgtccgtcaaaggcatcggacagacgacggattggtttgacacggagcatgtgatggaaaatcagggttccggcattattcttgccgatacgaacggtcgttatctgatcgctacggagcgaaagttgattgcagaagcaaaccagattgaggtcagcttttatgatgacagtactgcggaagcagaactgatcgcgtacgatggaacgaccggaattgctgttttaagtgtacagaaaagtcaggtgtcagaggatacgcaaaaccgggtggcagcagcgactctgggaagttcttcggcactgacacagggaaccattgtgatcgcaatcggaagtccgcttggagagcctttttctgttctgacgggaaacgtgacttccagcagtcatgaagtgacagctacggatgcaaattataaagtgatttccacagatattaatgccggttcaggcggaagtggtgcgctgatcaacttaaacggtgaggtcgtgggactgatcttgcagagttttggtacggaggcagcacaaagtaccgttacagcgattggtattacagagatccgttctatgctggaaaaaatgtcaaatggggatactccggcgtatcttggtctggaagtgagtacagtgtcaagtactatcgccaaagagaacaagatcccgaaaggggtatatgtgaaaaatgtcgcacaggattcgccggcgatgcaggcgggacttcaaaatggcgatgtgatcacacagattggcaatacagaactgacttccgcggaacagtatcgcacctgtctgttacaggaaaaagaggggcagcaggagaaagtcacacttcagcgtatgggcgcggataagaagtatcaggaaatgacggtggaagtaacgtttgatgcggcaaaatagctgaagtggcaagaacataagaatataagggcaaaaacaagaccagtcagaacatgacagcaaaaataataccgtaagaaaaagacagtatgaattagtatgaaatagaaaggacccgacaggggatgagtgaattatgaaatatattgaagaactgcgtgagggagaacgaatcggagaggtatatctgtgtaaacataaacagactgcgacaacaaaagcaggaaaaccatatgattctctgattcttcaggataaaacgggcaccctggatgcaaaaatctgggatgttggttccagcggaattgaggagtttgacaaactggattatatctatgtggtcggagatgtgaccagctttcagggcgcgttacagctgaatgtcaaacgtgtgaaaaaaatgtcagagactgatgtgaatccatccgattatcttccggtcagtgaatataatatagaagaaatgtatcagaaactgttagcttatatcgcacagatgaagcatccatatctgaaacagcttgcagagtctttctttgcagatgcagactttgcaaaacgtttccagtttcattccgctgcaaaaagtgtacatcacggattcgtgggcggactggtagaacatacgttacatgtgacacagatctgtgactttttcagcaaattgtatccgatgctgaaccgtgatctgctgctgactgctgcgatgttccatgatatcggaaaacttacagagctttctacgttcccggcaaatgattacacggatgatggtcagttactgggacatattatgatcggagccatggaagtgcagaaacatattgagcagattgaaggatttccgaaacggacagcttctgagctgattcactgtattctggcacatcatggcgaactggaatatggttccccgaaaaaaccggcgctggcagaggcgattgcgctgagctttgcggacaactccgatgcaaaactggaaactatgcgggaagcattgtctaacattccggaaaacagtctggagtggcagggattcaatcgtttccttgattctaatatcagaagaacaagcaagtaatatatcagatgagtaaaaataagtgctcccgatgctgttgtgtccggagcacttgatttctaagaagataggatgatatgtaatttgcagatttctgaaaaatataacgatactggaaaagattgcggcatggaatgatgccatgatatggctgcttgttgacatttgaaaatgatgttacttttggaaaggataactatgcagaaaaacgatgaattgattttgaaaatagaggatatgggcgtggacggagctggtatcggaaaagcagacggtatgacattttttgtaaaagatgccgttattggcgatgtggtgcgggcgaaggtcatgaaactgaaaaagacttatggctatgcccgtcttatggagctcctggaggcgtcgccggatcgtgtggaaccgaaatgtccgtattacagacagtgtggcggctgtcagattcaggctttgtcctatgaaaaacagttagagtttaaagagcgtaaagtacgtaataatctggaacgtatcggtggattttcggaaatcccgatggaaccgattgttggtatggaagagccatatcattatcggaacaaggcgcagttcccggtgggaacagacaaagatggccatatcgtgaccggattttatgcgggacgcacacatacgatcattccgaatcgtgactgtgcattgggacttcctgtaaaccgggagattctggatcttgtcattgattttatggaaaaatatcatgtttccgcatatgatgagaaaaccggaaaaggactggtgcgtcatgtgttgattcgctgtggatttaccagtcaggagaagatggtctgtctgatcatcaatggaaaaagtctgccacacagcgaaaagctggtggaagcgctgcgcaagattgatggaatgacaagtatttctatcaattgtaataccgagcgtaccaatgtgattcttggacgcaagacggtcgtgctctggggacaggaatatatcacagatcagattggagaaatttcttatgaaatctcaccggtatctttttatcaggtgaatccggtgcagacggagaaactttatggtttggcattggagtatgcagatctgcacggggaggaaaatgtctgggatctgtattgcggcattggaacgatctcactgtttttggcgcagaaggcaaaacaggtgtatggtgtggagatcattccgcaggcgattgaaaatgcgaaacggaatgcggtgaaaaatggtatcgaaaatgcagaatttttcgttggaaaatctgaggaagtactgccagagttttatgagaaagaggcggcagcaggacggaaggcgcatgcagatgtgattgtggtagatccgccgagaaagggatgtgacgaaaaactgctggagacgattgtaaaaatggcaccggatcgggtggtttatgtgagctgcgattctgcgacactggcacgggatctgaagatactgtgtgaaaatgggtatgaattaaagcgtgtccgggctgtggatcagttctgccacactgttcatacagagagtgtttgtttaatggaaagaaaagataaataagggagcaaattgcagaaaaggagaatgtgatgtacagaccatcaatgtataataaacacgatgaatcaatgtatacttttgcagaattgtttaataattgtaaggtttgcaatgatgtcataatgaaaccgaatgatgaagaaacgtatggaaatgatggatattttattcatagcaatggtcaaaagatcggctatgattgggaatatagagaccgatatttttcaaattgcaggctgcagtttgatacattgggacaatacgaaagaaaattaagaaaagattgtattcaaatagcaatacagtgtgactctaccgaaacgggaattgccgttggctggcatgaggattggttagtggaagcaaaagaaaatcgaagcttacaatagaaaaaaggtagagagaagaaaggagaaaagaaaatgttttgtccaaagtgtggtaagcaattggatgatggtgcaaagttttgtttcaactgtggattttcaatagaatccgttaacaaaaatgcgtagaataggaaggctggtgtgcagccgaaaccggttgaggtgccaaggaaacctgaagtagagccgatgcagccaatcaaagagcaacaggagaatatgcagtatgattcatcatatccgaatcataaaaaaagaaatgtgaagatggtgctggtggtggtcatagccgtaattgtggcagcgattgtagttatacttgtagcgcaacatttgggttacacgttaccgttcctgtcaaagaataattatactgtaagcagcgaccatgctaccaagtcggatactaaggatgatgaaaacatcgacagtaaagatcatcaggataatgatgataaagacaagaattctaatttgaataagaatcagaattctgatcaggacagtgattcagcagattcagaggagacagacaaacagtcatctgaagaggggattcatacctatgaggtgatcaccgctgatatgacctgggatgaagcatataatgactgtataaagcgtggaggatatctggcacgaatcaattccagagaagagtggaatgctattattgcacagattcaggcatccaacacagaggcatgctatttttatgtatcaggaaccagaaacgatggtggaagctcttattattggaagaatgaaaatggtgaattgtatggagaaccactgaacagcagtgcattctggggcaatgatctgtggcttgaaaatgagccgagttttcaggatggcgatgtaacagaagatgctatggcaattttgtatatgaaatcagcaaaccgctgggtactgaacgatgttgcaaacaacccgcttgaaacagaaagttatttgagtggaaaaattgcttatatttgtgagtatgaataaagaggttagatccatgaaattaaagtggataaaaagaatgagtgtgggcgcggcaattgccgtgctcactgcattttttgttgtcggatgcggcagcacagaaaaacagaataacgggagtttgtcgacagattccagtcaggacatttcggaagtaagtacaaaacaggaagttcctgaaaaatcagaagttcccaaaaaatcagcggatgagttgaaacgtgaaaaagtggaacaatatctggcagatatgacaaccgaagaaaaagtagcacagctatttgtcattacgccggaagccattaccgatgtacagacagtcacggctgctggaaatgcgacccgaaaggcactggaaaagtatccggttggcggcatggtatatatgaaagccaatctggtatcagaagatcagacaaaaaaattattggaaaataccaagacaatgtataaagaaatcgcggatttgccaatttttctgacggtggatgaggaaggcggaacggtagccagaattgcaggaaatgatggattttccatagaaaatgtcggttcgatgaatctgatcggggaaagcggagatactgacaaagcatatgaagtcggggttacgatagggacatatctttcggatcttggatttaatgtggattttgccccggtagcagatgtacttaccaattccgaaaatcagattgttgccaagcgttcttttggttctgacagtgaactggtgaccaatatggtgttggcagaaatgaaaggatttgaagaaacgggaatattatcctgtgtaaaacattttccgggacatggatgcaccatcggcgatactcatgagggttatgcgtacacggataagaccagggaggaattacaacaggaagaactggtgccgtttcaggaggcatgcgcgaatggagtaccttttgtcatggtggcgcatatttcagcaccgaatgtaattggtgataatacaccgagttcattatcgccagttatgatcacggatattttacgaaatgaatggaattacgatggaattgtcattacagatgccttgaatatgggagctatcgtacaaaattattcttctgccgatgctgcggtcaaagcattacaggcaggtgcagatatgctgttgatgccggaaaattttcaggaagcctatcagggcgttttggatgcgctggagaatggtacattgacacaggaacagattgattgttctgtaagaagaattttaaatgtgaaattgagtatgcagtaaatagaacaatctattatttgatataattcctatctttacagtatgatataaaaatgctaaactaccagttaagaaattttatcttatttttcattaaggcattcatagttactgaaagaaggaatggacatgacatttgtacagttaaaatatatattgaccatagcggaaacgaaatcactaaataaggcagcagaacagttgtatgtatcgcagccgtctctgaccaatgcattaaaggaactggaaaaagaagtaggaattaccatctttttccgtaccgggcgcggtgtgacattgacaaacgatggtgtggagtttttgacctatgcccgtgagatttaccgggagtatgagcagctgatgcagcgttatggggatggtggttcttataaaaagaaatttgcggtatctacgcagcattattccttttcggtaaaagcgtttgtggatgtggcaaaaaaactggatatgtcaaaatatgaattagccattcgtgagaccaagacagcggaagtcatccaggaagtaagcacgatgaaaagtgagattggaatcctgtatttgagcgaattcaatcgaaaatccatggaaaaattattcaaatctgcaaatctggaatttcatccgctgatcacctgcaaagcatatgtgtatttgtggaaggatcatccgctggcgaaggaaccatatctgacgctggaacaactggaacattatccgtgtctgtcctttgaacagggagatgacagttctttctatctggcagaagaattgttcccgaccaatgaatacagtcagatcattcatgccaacgaccgggcaacgatgctgaatctgatggtcggtctaaacggctatacgttgtgttccggtttgatctgtgaggaattaaatggcagtgattatcgggcagtaccgtttcggagtttagatcagacgggtgatatacaggatgaaaatcagatggagatcggatatgtcaccagaaaaaatctgattttgagcaaactgggacaggaatatgtgatggcactgcgccagtatctggcgtagtagtttgtgattaaaaaattgagttagtgaaggcaccaaaaacaagaagaatttcccagacataaaaaccacatctccgctcatactaggaacaagacagaaagcttcacaaggatacttctgttgagttgaaaagaaaaacaacctttcccattcaacaaaattaccgggaagcgccctgtctttactatagagaaaaacattacggaggtgtaacaacatgagtaattctaagagctcaaacaaagtgtcagttccggaggcaaaagaagcaatgaaccgtttcaaacaggaagtggcatccgaacttggagtacctttaaaagagggctacaacggagatctgacatcccgtcaggcaggatccatcggtggtgaaatggtgaaaaaaatgatcatgagacaggaggagcagatgtctgacaaataagacctgctaaaactactcagatcagagagaaaatcatataccgaatattcggatatgagaaaaaagaagagcagctgcgttgtgcggctgctctttttctatgaaaagttggcgcttttcataatgaagattgaaacgttacaaagtaaaaaggtctttactgttgttccaacaatatagcacaacaaaagtattctgtcaattcaaaagttataatttttgaagtaaaaatttaaagcaaaattttgtgtatttttacgtcaaaacaacaattgacatttccactgtataggcatattataatgacaacagctgttgaaataaaagaaatgagattttaaaacaacaataaaaggcaataatgaaaaagaaaatatttttgttgttgcaaaagcgaaaaaacgggaataacatgtagaaaggagcttttattatgaaagcaaaaggagtaagattacacgcagcaaacgacctgagactggaagagttcgaacttccggaaatcacagatgacgaaatccttgtaaaagtagtttctgacagtatttgtatgtcaacttacaaatgtgcgatccttggaacagagcataagagagtacatgaggatgttgcagagcatccggcaatcatgggacatgagttcgcaggtgacatcgtaaaagttggtaaaaatcatcaggatcagtttaaaccgggtatgaaatttacacttcagccggcattaaactacaaaggaaccatgtggagcccaggatattcttatgagttttttggcggagatactacttattgcgtaattccagcagaggttatggagcttggatgcctgcttgagtacaaaggccgtgcttattatgaagcttctctggctgagccgatgtcctgcagtatcggagctttccatgcagcttaccatacacagatgggtgtatacacacacgagatgggtatcaaagagaatggtaaacttgcgatcatggcaggtgcaggcccgatgggacttggtgctttaacctatgcattacaccgcgatgtacgtccatccatggttgttgttacagacattaatcaggagcgtctggatcgtgcagaggaattattcccggttgctgattataaaaaggaagggatcgatcttcattttgtaaatacaggaaaatttgaggatccggttgctgagctgatcaaaatctccggcggcacaggatatgacgatgtattatgttatgcaccggtatcatctgttgtaactcagtccagcgcaatccttggaagagatggctgcctgaacttcttcgcaggtccgacagacaaaaaattcagcgcagagatgaatttctacgatgtacattacaattctacacatgtaatgggaactaccggtggaaatactgcagacatgatcgaatctctggagctgaccgctgcaaaacgcatcaatccggctgttatggtaacgcatatcggtggactggatgctgcagctgagacaactctgaatcttccgaagattccgggtggaaagaaattaatttatacacatttaagcatgccgctgacagcattagatgaactgagaaaagcagcagaagagagaaacgatgaccgttacatcgctctggctgacattgtagatacacatcagggattatggtgtccggaagcagaagaatatttacttgcaaactttattacagaataagtactgccagaattctccgatccgtcaggaattgagagtctctggcggagaggagagactatggacgcaatggaaatgcgcagaaatgcgattgcagaactggtaaacaaacacggaaccgtaagtttttcacagattaaggaacagttcccgaatgtatcggaaatgacactccgtacggatctcaaagccttagatgcggcaaaagagatcgtaaggattcatggtggcgcaaaatctgtacagctggtgatcggtacagacgactatctcaccagacgttcggtgcgcaacatacaggcaaaacaggagattgcaaaaaaggcaaaacagctgatcctgccggataccgctatttttctggattccggaagtacaacgacagaacttgcccggatttttccggatcagtccaatctgatctataccacaggactttcctgtgcaacggaacttgccaatctcacaaagcctgtcatcatgctgaccggcggacagttgaaccgctacagcatcagtatgtacggtatctccgcgattcgggaactggaacaggtaaactttcatcagacatttttaggggtaacagggtattcaatgaaagcaggttttacctgtggaaacagtgaggaagcaatgttaaaacgcacagcgatcgcgcaggcggagcaggtgatcgttttgatggattcttccaaaacagatgtcaaaagtacttatacaatctgtggtctgtcggatgtggacgtcattatatccgacggaaaattgccggaagattttcttttggaatgtgaaaaacatcacattgtcgtatattaaaaatagtacataaaaagaaagtttttcggatgctggttttgcaatatttcccattgtgttcgtagtatggggactacaaaagtgggaggtattattgtgaaaaacaaagtacagaaattcggtaagttcctgtcgggaatggttatgccgaatattggagcattgatcgcatttggttttctggcagcgctgttcatcgatacaggctggattccaaatgaaaaattaaacagtatggtatcaccgatgctgacatatctgatcccaatcctgatcgcatctaccggtggaaaaatggtaggcggcgacagaggtcgtgtcgtaggtgctatcgcagttatcggtgcgattatgagtgatacatctatcacaatgctgatggctgctatggttatgggaccgttggcaggattttgtatcaaaaaatttgatcagctgatggacggccatatgccggcaggatttgagatgctgatcaacaacttttccgcaggtatcattggtatgctgctggcaattctggggtatgtggttgtcggcccggtgatgagtggtattttagctgttctggcagcaggagtaaatattctggtaagccacagcctgcttccgctggttgcaattttcattgagccggcaaaagtattattcttaaacaatgcaattaatcatggtattttcacaccgctggctactgcacaggcagcagaggtcggaaaaaccattatgtatatgcttgagccaaacccaggtcctggacttggtgttctgcttgcatacatgttcttctgtaaagataaaaagacaaaacagtccgcaccgagcgctgtgatcattcacgtattaggtggtattcatgagatttacttcccgtatattttaatgaatccgcttgtgatcatcgcaccgatcgtcggaaatatggtagcaattttctggtttaacctgacaggctgcggtctggtaggaccggcttctccgggctccatcattgcatatctgatgatggctccgggaccggatatctggaaagtattagttggtgtggctatcgcaacaggtatttcctttgccatcgcatcaccgatcgtaaaaatggcaggtggcaagaccagtctggaagatgcacaggcagagatggcagcgatgaaagcagaagcaaaaggtgaggttgctgctccggttgcaatcaaagatgcatctgaagtaaagaaaatcattttcgcatgtgatgcaggaatgggttcctctgctatgggagcaacaaaattccgtaaccgtctgaaagcggtttgtccgcagattcatgtaagtaacacttctgtcgataatattccggcagactgcgatatcgcggttgttcagacaacactggcagaccgtgcaagaaaatctgcaccgcaggcacagcttgtgaccattggaaacttccttgcggatccggcattggatgaactgtatgaacagctgaccagcaaaaccgctgatacagcagcttctacaccgatagctgatacaaatgttataaatgaaaaacaggcagagaaaacgacacctgttgttgaaaatgcagaaatagaagaaaaaatttcagacgtatctgctgagacatcacaggctgcttctgagaaaaaacaggttctgatcaaagaaggaattcgtctgaatcaggcaccggtttcaaaagaagaagttattcaagcagcaggtgagttattacatcagcttggctacgtggatgaaacttatgtagatgctatgcaggaacgtgaaaaactgatcacaacctatatgggaatgggtgttgcaatcccgcacggaaccagtcaggcaaaaggcaccgtaaagaaaactggtatcgtattcttacagtatccggaaggtgttgattttggtgatgaaaaggcacagcttgtgtttggaattgccggaatcggggatgaacatctggatctgctggcaaagatctgtgaagtattggaagacgatgaagtactggaaaaaatgaaaacgacttctgaccttgactgggtaatggaacggttatcttaaaagtttctttggtggtaaaaatttaagattgtgaagg

SEQ ID NO: 13284 - DNA, 2580 bp, Unknown
  gut microbiota DNA sequence
aagtggaagttttatatattccgtaacgtaaattggggaatcaggggattttttcttggaaagcgattgttagctgacaagacaaaatcccctgattccccattcaatacctaaatttttcccgccgcagaatttttacctacgtgcaaggtgcccattcagccacgtaaggatatctgcatagaccacatcacgatcggtttcattcaaaatctcatgccgatctcccggataaagtttgatctgcacatcctgaatgccggcatctttatactgctggcagacctgcgtcacgctttttccattatttccaacaggatcatctgcaccggcaacgaaaaacagtggcagattttttggaatctgctgaatatgagccggattctgaatatattgtatcccacgaaacatctggtaataaccgtttaccgtgaagcggaaagtagaccacggattgttgacacaggcatcaataatggcttcatccttggtgagccagtcacttggtgtacgcgcaggttcaaattgtttattgtaaccgccaaatgccatattatctacaaaggaacttcggtattcccatccgcgaaacagcgcgatcagtcggcagagcagctttccgatatgtaacacaatgcctggttgggaaccggttcccatgatcacagcacctgccagtccatccgcatgcatttggatatactgacgagtcagaaaggaccccatgctgtgtccaaggaaaaaataaggcagatccggatattttttctgcgtcatagtccgcagggtatgaatatcagcaataacacattcattgccgtttgggtgtccgaaataaccgtgctggtcgtcggtaacaacggatgcgccatgcccaaggtgatcgttggcgaccacatagtaaccctgagcggcagcatgttgtgcaaaatcgtcatatcggtctgcgtaatcaaccatgccgtgacaaatctgcaagaccgcttttggtgtaccttccggttcccagataatcgcgtgaatctgtgtttttccatccgaggatgggtaagtgatatcgtgtttcatattggattttccccctctacaatctgtacttctcaaataattaaaatgtcgaacgcacatgagatttggtgcgaggctctggtaagtgtaagcagatacattttttcagaatcatcgcaagcccatccgtgattgttatgcttccatcatatcgggaaaaagtaatggatgcaagagacaaatgccgggaactgtagtgaagtggcggtatcgttcattgacgaacccgaacaggtatgctatacttttgggcaaaagaaagcaagaaggagcttatcagaatatgagtcaggcaaaagttgatagatataaagaagaaaagaaaaacagaaaacagacaatgaaaaaagaaaaacgcaatcgtgtacttgcaagatcccttggtgtagtgattgcggcagcagctgtatgctggatcggattttccggatattcttattatcaggagaagaaaccgatgacaaaaacagaactttccacagcagcactgagtgattatctgagcggattgaccacaacagacagtgcatcagagtaatccaaaaagttttgaaaaatattaccccatcgtgagcagcagatgcccgtcgatggggtttgttttttgcaaaaatcgaataaaaatgagtgttgtgtcatgttattcatcagaaacaatcgctttgtccagcgcatcttcgactgcattcaggagcatcgttgcggtatattgattttcttccgaataagaaatgttgtcggtggactgcgttttgcagatctgctcactgatattgtccatggaggactgcatcagcggatacatggtggcaacggtatcattcagatttacaaaagacacagagttaatgtgatcttcatccactacgacctgcacatccaacgtctgcccttcaaaggcgattgaagatgtgtatacaccggctttgtatttcggctggtcgctatcgtttttctgatgcctgcccggaccaaacatgtagatcagtaaaaaaatgagtacaattccgagaataataaaaatggttgtataaatgacttctttcatgtgaagcactataatttttgtctttgaacgcatgcaacagtttccccctcataccatactttgtacatcatatgcaaaaagaagaaaaatatgtgttccttcggaaaaaatggggagaaaagataggagaaaggctttttggatgaaagcagggggatttgattgggaaaaggacgctacgcgctctattatctgagaacctggtagcattagaatctgacaaaaaagaaccagtttttttcgaatctgaaaaagtaaatgttatcttctggtacaaaatttcagatggaataaaaaataatgtaaaaaaattgaaaaaagtgcttgacttttgggactgaccgcggtatcatatcacttgtcttgaggcgaacagctaaagacaataagatatgcgcgagtggctcagttggtggagcgcgaccttgccaaggtcgaggccgcgggttcgagtcccgtctcgc

SEQ ID NO: 13285 - DNA, 1639 bp, Unknown
  gut microbiota DNA sequence
ctgcgatactaaacttaccactttttcagtggcgtccctatagaggtgggagtcatctcccatctgatataaattgtttcgttacggtcccgttataatagaaaaactgtaatagttataacgtaacagtacaacaaatcataacaataaaaatcggacagatatcggggattctaataaatctctttatctgtccattttttatatcttcttatcagtacctctcagtaattacaatgctttacactaacctatttttctctttcacatcttcacccactgcatctaccagtaatcacaccactttacacaaacttatactctgcccactccattcaccaataatcacaccaatttacactggcttatattccgcactttcgcattttcaaccgctgcatctacgcaataattgcactgatttacaccagtttatattccttcaaccgcttcctttgcaccttataatctgggcaatatttttctacttccgcccaaaaatctgcggaatgattcatatgtcttctgtgcgccaactcatgaatcaccacataatccaacagttcttccggcaaataatataactgatagttaaaattcaaattgcccttggaacaacaacttccccaacgggttttctggtttcggattgtaattcgtccaaccgtcacgcccatgattttgctataatatgctacccgtgaaccaattttttccttaatctgatccagatctctgcttgagagttgctccactgggattgcacctgttgtttcccgctgttttatacgtgactgcatctgttctgttttttgccaaatccacgtctgctcccgtgtcagaaaatcctgcagcgcacgtgcggataaacgattcgggattcgaagaagtaccgtcccatcttcccgcatctgtaagccaatgctttttctcgctgaccggatcacataaagcgtcagtgtacgaccatctttctgtaattctatgcttgtctgattgctcatagtatccttgtatatcctcgtttctctatatctttcaaattatttttacatgttgtctctgttataaataattctatacatatcacagttttcgtaattttactttttgatagatgctgattccgcccgcctgttctcttattattttttcaacaccacgtattacatcattatttatactgtcgaatcaaccgttcaatttcctgtttcatttcatccactacatcatccggcgaaataatttttaccccttctccaagagaaaatacccatccaaggaactgcctgctgacatgcacgttcacactaactgtaaaataattttcatcctcccacaacaagccccacggactgatgtgataccacgcaccattgtgccgcaattctgtctcctttttcacattccattgataatattgaaatcggatttttttactttccaacgggctcgccttctacttcaatccccagtttttccagatcacgtagatcgttataaatgctttttctgtcagctgtaacctcatacgttgctaatgctttcatgatttcaggcatggtgatgtaatgttcatcatctgttttttctaacatgatctgagctagccgatataacttaaatttctgattcgttc

SEQ ID NO: 13286 - DNA, 3794 bp, Unknown
  gut microbiota DNA sequence
gtttgtaatataatttattgtacttaacaaatctgtctcaaatataggaagataacggagtgaataagatttattttccatatattgcactccttgcttttttaaatacactttcatgagaaagtctttcatcagtcactgctgcttgccgatccgcctcatcaagcttcatttctatattatcagtaagactagcatattcttctaaacttaaaaccaccatagcaccataaccattttttgttaaatataccggatttccgttattaacaattgtctcaatttccggaaatttatttctgaggtcagaaacaggtctgatttgaatcatttttatttctcctttcgctttatattatctttattttatcttaattttatcacatttgcaatttcttttgttaaaaataaaaattaatatctttttagttcatttacgtcttttataactattttcactataaagtgatactttattactgaaaggaagtacttatatggaaataataaccaaatttattacagaaaaaatacattcaaatcatctattcataagccatacttatctcgcattgactttagtgcaatttgtgcatcttttacctgcccttccttaatctgattctcagatatttttatatcaccatatattttagtctttatatctcttaaatgatttttcacatcgtcatccgtcggcttccacaatgttccttctttataatgtttcctgcacaaagccacataactctcattggaaccaagcataatctgtgcatcttcccggacaatcttcccatctgcatatctggtattacactgtgtccgtttgccacaccaacagaccgtcggaacttcttctatcacgtcagcgatatccatcaaccgtctggagcccggaaacaagtgattcaaaaaatctgttcgtaacccatagcagagaaccggtatctcataaaaatcaacgatatccgacagtgtatccacttcctacactttcaggataaaaccgataacttcttacaggttagaagctaaaaaaatgaagtgtaaaaagaaaggaaagaaaaagcagcctctcgcgagaccgcttaaaatatggttttttcagttttcaagatattacagtttttgggtaaattgacaatacttttcttaactcacacactttgttttacgccttcacgaattgtaattgtctaaatattatactctgtcatctgattacagccaatgaatctgtgtcgttgcccttggatgctgcggtgcattattttcttttgcatatccaagcacacatgcaagaaatccatacctaccaacctgaagtccaagcatatcgcagaaatcctgattatttaccatattttctgtaacagaaataagctgaaaatccagatttaatgcagtagctttaatccacatattctgcatcatatgtgcaagactctgatgttctgctcttctggcgccacgccactcggccgcaatgatcagacagggtggatttgggaaggtgctttccccgcattccgcaacatgtttccacaattttttgacaccttctccattttctttcaaaaaaggatctgtctcttcttctttgattcttgcatctaaatctatctggctctgctgcctgataaacgcatctatttgttccattttcggatcatcctttttaattacaaaaaaatggcggaacggtgtaactgcttttgcatcaatggacgcatatggtgcgatacatccagcctggattacttctttgatttcatcatcagtcggcacattctccgcaaatgcacgacaagtttttctggcatttaatatacgatctaatacctgattatcttcttttgtaaacatattttatccctcacgttcaatttttatttattgtaccagaaataaccaatgtctgtctataacgacagtttaccagttttttatcctctgttaattattattattcgttaatgttcccacatattctccattattatatacaaatggaccggcttctccctcttctccgaaatactctggtctcagtgaaaggatattaagcaattcatccatattatgcacctttgttgcctgatacggttgttcaaatgcaattttttccacaaataaataatagtcactgtattttattaataaaccggtatgtcctacgaaaataacatcagaatccgggtcgtatattgcaatactaagcagtgaaatcctgtcactatttatttgaaatccatattgcttccagctatcagaaaatgttgtttccggatgtttctcatccgtaacatgcttttccccatatagtgtagtaaacatgtttatcttctgttttattgttttatatctgtctgcattatctattgcttccgtatcgaacatcaaatacgtgccgttatagtcagcttctgttgattccgcgtgaagcagcccatccagcagaagaaaggctgtcattctgcaatcggtgtctgaatagtcatgagttttttcccaaccatccatacatttaccggtatcagtattcattttttcaggatttgaccagctatcttttaactttgcattctttcctgcagaatttgcgaaatcagtcacccattcttgaaatgtatctacatgtgaagctcccgcagaactaagttctttgcaaatctctgtaatagtattgtttcctcccatataagttgctgttggcagtttttcttttttttctgcacatccactcaacatcatacataaaagaataataaaaaccgataatttaatagctgctcttattttactttgtcttttcaacagatattacctctccttcaaatggatcaacttcagaaattgttcctatatattttacaatcacagtatctccgttgcaaacgctctctaatccatccggcttttcttcaaaagtaaaactatatggtgtgttctcatcgtctataataacaaattgaaaatccttaatctcatcgattgttcctgtaagctccttttctttttttatgccttcctgtttagactcttcattaacacttgttgcaacattatcgtgatttgtctctttacttgcacagcctccaatccatccgatacaaaacaccatgccaattatgatcgtaattagtttcttcttcattataatacctctcttcttagtatttttttattattagtactcgcatgtactttttcagagtatattactctttataccatgtaaatagaataccaataaaattaaagaaatatttattttttgttgttgtaaatagtatgcctatatgactcaaaaaagtgacagaagttttttatctcctgctacttttgttttattttcttatggacaattacaatgtatccaaatagttcactaattcattaaaattagcaatccatatagaatccactaattcatcaccatcttcagaaactcagaaattgaacgccttcgccattaaacaagggaaatgtaatgtagttcaaggagatgtatctgctatacccttttctgacgcgacttttgattatgtttctgccttcgaaacagtttacttttggccaggattagtaaaatgcttttccgaggtcaaccgtgtgctgaaaagcgaaggcatattcctgatttgtaacgagagtgacggaacgaatgccgcagatgaaaaatggacaaagatgatcaatggtatgaagatttacacatctaaacaacttgttgccgctttgaaagaagcgggttttacagagatcaaaacgtattcaaatgcaaaaaa

SEQ ID NO: 13287 - DNA, 208 bp, Unknown
  gut microbiota DNA sequence
accagggagccgcatgaacatttcgttctgttggctggattataaagaaaagaatcctgatggttatgagaaatcacagttttacgaatacttcaaccgattcatggcagaaaactatggtggccagaaggtatcaatggccgtaaaccgaatcccgggtgaaaagatgtatatcgactgggtcggtgatcagccggaactgttaaca

SEQ ID NO: 13288 - DNA, 694 bp, Unknown
  gut microbiota DNA sequence
tttcatttttgtacacaattactactttttatctttctcttgcctgcccctctcaaatgctttattatagagttagtcaaaattcactgaaacaggaggacacatctatggaattaaatcaggtattagaagcaagaagaagtatccgtcattatcaagaccaaccggttgatctgacactgatcggacagatgatcgaagcagcgattctttctccaagctggaaaaacagccagactgcacgctatcacgttgtttcatctccagaaatgttagaaaaaatcaaaacggactgtctgccggatttcaatcagaaaaactgtcaggacgctccggttctcatcatctgcacctttgtgaaaaaccgtgcaggcttcgaaagagacggtcagccatccaatgaagtcggacagggatggggattctatgactgtggtcttcataatgagactctcattctgaaagccaaagacttaggtctggatactctggttatgggaatccgcgacagcgaaaaaatccgtgaagcgttaaatattcctgaaaatgaagagatcgtttctgttatttccgttggataccgcgcggttgatccggaaatgccaaagagaaaatccatggcagatattacaaaattctattaagaatgcttgaaaaaaacgaaaatagctttgtattcaacacaaaaaagagg

SEQ ID NO: 13289 - DNA, 17062 bp, Unknown
  gut microbiota DNA sequence
catctgcatcagcctgcgatttcacaccagaatatgtacatgagaatcagaaaaaactgcatattccgaagattacagaccgcagtatgttaaaaccaatcagcgatctggagtactggaatcagtttgatgagaaatgtatgtcctgcggtggatgtaataccgtctgcggaacctgcagttgttttgatacagtggatgtcatttatcaggagggaagccgaagcggagaacgccgcagagtctggtcttcctgcatgctggagacatttacccagacagcaggtggtggtcgtgcccgcaagacgccgggagcaaatatgcgttttaaggttctgcacaaattttatgattttgcagatcgatttgcaaaggatggaagccatggcattgcctgcgatgcgcagatgtgtatcggatgcgggcgctgtgatatgagatgtccgaaaaaaatctcattttttgatgcggtggacggacttgcagcggaaattgaaaaaatgaatacaggagaggaggcgtagaacaatggaaaatattatgaaaccggaaccacacaaaatcatacatgttgtgcgccagacgacagcggagtttacgattcgtgtagcatgtgacaaagatccgggttacggacagtttttccagctgtctctgccgaaaatcggagaggcaccgatctctgtctgtggaaaaggaccggggtatgtggaatttaccattcgtaaggtcggacgactgactggcggagtgtttgatctgaaagcaggagatacacttttcatgcgtggaccgtatggaaatgcattcccggtggagcagtttgaaaataaagatctgctggttatctgcggtggtacgggtatgtctccggtaaaaaccacactgacccatttttatgatcatccggaaatctgtaaatctgtgtatttgattgccggatttaaggatatcaactgtgtgttgttcaatgaggaacgcgcgaaatttgcagagcgtttccattgtacgtattgtctggataactcagaggcaccggggttccacaaaggaatggttacgaaatatattccggatgtgccctttgataccttcgatgattataatgtggtcatcgtaggtccgccgccaatgatgcggttttcagcgctggagtgtatgaaatgcggggttccgccggagaaaatctgggtttcctttgaacggaagatgtcatgtgcggtaggaaagtgcggacattgtaagatcaatgagacgtatgtttgtctggagggaccggtatttaattatacgaaagcaaaagaattgtttgactagaaagattcttttgtggtgaaaatttaggatatggaaagggtctgggttcattttgtctttgcggctaacaatcgcacgccaagaaaaaatgaacccagacccttatttcagttacatgaaaattgtttgctgttgtgattggaaatattagaatataaaaaatgtcgatcatatagaataaaaaaagattgacatactttaaaatatcgttctggctatagtagaagaattacggatgaacaccgcttggtttatgatattgatcataatgataatttgatcatttatgctgcaaaatatcattatgaggaagattaacaccgagagatgtttttctttttggggacaaaattcgaagaaatttgtataatctgctgtttttttctggaaaattttgtgcgatatgatgttgactcacagaacaaatatgagtagaatataaattagttaagaaatggtagaaccaattaagacaatagatgtttccaggaaaataaaaagatgattcagtttttgcaagtgtgattatcaaaataaaagccattgaaaactttattttttacactgattggtactaccaaaaaataaaacaaaagtggcagtaccaaaatgcatatttacaattaagcatgtaaaaacatgtatttataattattcagaaatgaatatacagcaaaaacgaacgtttacaatcgttcgtaaatgaacacaaaacaaacttgttttatgagggggaatcaaaacatggcagaggtaaccttaccttttggcaaagaaaaaatgaaggtaacaattccggacaatcgcctgaatggtatccttgtttccaaggcgcatgagtttcaggcagacaagccagaggaggaaatcgtaaaagacgccttagcgcatccgattcattccaaacggttacgggagctggcaaaggggaaagacaatatcgtattgattgccagtgaccacacaagaccggttccaagtaaagtgatcatgccgggcattttagaggaaatcaaagcaggtaatccgaatgcaaagattacgattctgatcgccactggttttcacagaccgaccacgagagaagaactgatctacaaatttggtgaagatattgtagatcgtgaggacatcacatttgcagtccataaaagtcatgaaaatgcagacatggtagaacttggcacactgccatccggtgggaaattgaaaatcaataagatcgcagctgaggcagatctactgatttccgaaggatttattgaaccgcacttttttgcaggtttttccggtggaagaaaaagtgtactgccgggagtatccagtgcagcaaccgtcatggcaaaccattgttccgagtttatcgccagcgagtatgccagaaccggcgtgctggaaggcaatccgatccatcgggatatgatttatgcggcagaacaggcaaaacttgcttttatcataaatgtggtactggatgagaacaaaaaagttatccgtgcatatgccggagatttcaacgaagcgcaccgggaaggatgcagattcgtggatcagatgtccggtgtggatgcgattccttccgatatcgtgatttccacaaatggcggatatccactggaccagaatatttaccagtccgtcaaaggtatgacggcagcagaggcaagctgtaatccaggcggcgtgatcatcatggtttccagctgcattgatggacatggcggacagtctttgtatgacacctttgccagcggcggagataaaaatgtgatcatgcagcgtttcttagatacaccccgtgacaaaacgattccggatcagtgggaagcacagattttgtgcagagtgctgatgcatcacaaagtcatcatggtgactcaggcaccgaagcagctggtcaatgacatgcagatggattacgcagagagcgtagatgaggcaatccgcatggcagatgcatatctgggaaaggcggatagtaagatcactgtgattccagatggtgtatccgtgattgtaagaagaaaatagcacttgaaataatatttttactacgctgacagaaagtgaaaatatacagtgaaaaataagctgttaaaaataaaatctgaagtcaataatttgatgaaatatgataattctcctatattttgaacatagaaattgcaaagtaattgtgttcagaatacgggataggataaagattttgagaaatgtgtaaaaggaggatttggatgatggcagattacagctacaaccaagtgacaccggaactcatagaagagttcaaaaaaatcgttccgggcaaggtattcaccggagatgagatcaatgcagattactctcacgatgaaatgccgatttacggaaaaggagctccgaccgtattgatcgaggcaactacaacggaggatatttcagcaatcgtgaagctgtgttttgaaaacagcattccggtcattccgagaggtgcaggaaccggtctgactggtgcatctgttgcactgcatggcggtgtcatgatcgacatgtccaagatgaacaagattctggagtatgacaaagagaactttgtagttcgtgtagaggcaggcgttttgctgaacgaccttgcagaggacgcacaaaaacagggactcttatatccaccagatccgggtgaaaaatttgcaactcttggcggaaacgtatctacaaacgcaggtggtatgagagccgtaaaatatggatgtacaagagattatgtcagagcaatgaccgtagtacttccaaccggcgagatcgtaaaacttggtgcaactgtttccaaaacttccactggatacagcctgttaaatctgatgatcggttctgagggaactttaggtatcatcacagagctgactttaaaactgattccggcaccgaaggaaaccatcagcctgatcattccgtatgagaacctggaagactgtatcgcaactgttccgaaatttttcatggagcatttacagccacaggccattgaatttatggaaaaagaaattgttctggcttccgagcgttaccttggtaagaacgtgttcccgcagcagttagagggcgtggacattggcgcatatctgctggtaacttttgacggagaggatatggaatctctggaagaaatcactgagaaagcagcagaagttgtactggaagcaggagcaattgacgtattggttgccgatacaccggcgaagaaaaaagatgcctgggcagcaagaagttctttcctggaagccatcgaggcagagacaaaattgctggatgaatgcgatgtcgtcgttccggtaaatcagattgcatcttatctgacctttgtaaaatcactggaatccaactatgattttaccatcaagagcttcggtcatgcaggagatggaaacttacatatttatgcatgtgccaacgatatggatgaggcagagttcaaaaaacaggttgctgatttcatggatattatttacaaaaaagcggcagagtgtggcggactgatttccggcgagcacggaattggttatggaaaaatggattatctggcagcatttgcaggtgagacaagcatgcgtctgatgaaaggcatcaaagaagtttttgatccgaagatgatcttaaatccgggcaagatttgctacaaattgtaaaaacaagctgattttacgagtgttgctttttgaaagaatttcaagaatggaatgtagaagcagtagaacactgaaaatccgattttgtgagaaaaataacaattagttgaaataatatttgaaaaaataggatcacttactataaggaggagtcaaaatggcatatttaatttctgaagaagcacaggatctgttacaggacgtaaaaaatttctgcgataaagaagtcgtagagcagtgtaaagcatacgatgtatccggcgaatggccgaaagagatttacgataaagcgatcgagcagggatatcaggcactggaagttccggaggagtttggtggcccgggtttatcaagagtagatgtggcagctctcatcgagcagatggcaattgcggatgctggatttgcaactaccatttccgccagcggacttggtatgaaaccggtactgatcgcaggaagtaaagagttaaaacagcgtgcatgcgatctgatcctggaaggcggcttcggtgcgttctgcctgactgagccgggtgctggttctgatgcaggcgcaggcaagacaaccgctgtcaaagacggtgacgagtatgtactgaacggaagaaaatgctttatcacaaacggcggcattgcttctttctactgtgtaacagccatgacagacaagacaaaaggtgtcaaaggaatgtccatgttcttcgtagaaaaaggcactccgggcttgagcacaggaaaagaagagaacaaaatgggtattcgtacttccaacacctgtgatgtagtccttgaggatgtcagaatcccggcttccaacctgatcggtgaggaaggaaaaggcttcaacatcgcaatgcagacactggatcaggcgcgtacctggatgggatgcgttgcaaccggtatcgcacagagaggtatcaacgaggccatcgcttacggcaaagagcgtgtacagtttggcaaaccgatcatcaaaaatcaggcgctgaaattcaaagtagctgatatggagatcaagacagaaaccgcacgtcagatggtagcacatgccttgacaaaaatggatctgggtcttccttatacaaaagagtccgcaattgcaaaatgctatgcttctgatatcgcaatggaagttgcttctgaggccattcagatgttcggcggatatggctacagccgtgagtacccggtagagaaactgttgagagatgccaagatcttccagatctttgagggaacaaacgaagtacagagaatcgttatctcaaacagtgtgatcggtaaataagttatcccttatctaacaatatatgtattccgtcgatggacattttttgaaagttggcggaatacgaacaaaaaatatgcaggagaaatcattatggaaatattagtttgcatcaaacaggttccggacgattctgtggaaatctctttggatgaagccacaggaaaaccggcactggacggggtaacacctgtcgtaaatgcatttgatacatatgcagaagaaatggcagtacgtctgaaagaagctgttggcgagagtgaagtgactgtggtatccatcggagatgacagtgtgaaaaactccttaaaaaactgtctcgcagtcggtgccgaccatgcatacctcgtaaaatatgacgaggtcgaaaaattggatggtgcggcagttgcaaaacttcttgcaaaagcaaaatcagacattgaagcaaccgaaggaaagacatttgatcttgtattttgcgggaaagaatctactgactatgcagcaagtcagactggcttgttgctggcagcggagttaaatgttccggcagttgccaatgtggtagccgtagaagcagcagatggaaaagcaaccatcaaacaggaaacagagaccggatacaatgagattgaagcttcccttccttgtgttgtgaccattcagaagccaaattacgatccgcgttatccgaccatcaagagcaagatggcagccagaaagaaaccgatcggtgaacttgtgaccggagatgttccggcaagttctatggaagttgtaaaagtatatgcgcctgcaaaacgtcaggccggtgtaaaaattaaggcggaatccccggaagaagctgttgctaatgcaatgaagctgatcgcggatgccaaggtattgtaggaggtcgtggaaatgagtctgacagatggaaaaaatattttagtatatgttgagactgcccagggcgctccagtaggaccagcccttgagattctggcaaaggcaaaagagcttgcagctgcaaaaggtgaagaagtgatcgcagctattcttgcagaagcgccggaagaagctgcaaagacagccgttgaggctggtgcaaatcaggcagtaatcgtaaaaacagcagaaagcagaccggaagtgcgggcagcaatgcttgcaaaactggttgaaaaatatacaccgtcactggtgctggcagcagctacacaggagggcaaagatgtcactccgctgcttgcacagaaatttgaggcaggatgcgctgttgatgtcatgaatattttggcagatggcgatcagtatgtatttacctgcccggtttatggcggaaatattttaaatgatgttgtattgcatacccagccggcagtagccaccgttcgcggcggttctttttccaaatcaattgaggcgggaaaagccggcaagattatagaagaaacagtagaaattccggaggagtctgtatttacaaagatttccaatgtggtaaaagagatcagtgaggcagtcaatctggaagatgcagatgttatcgtaaccggcggtcgtggtatgggcagcaaggaaaactttgcgctggttcaggaattggcagatgtctgcggtggtgtcgtaggtgccaccagaccggcgattgaagaagagtgggttggtcgttcccatcaggttggacagtccggcaagatcgttgcaccgaagctttatattgcttgcggtgtatccggagctacacagcatgtatccggtatgattggatctggctatatcatcgctattaataaagacgaagatgctccgatttttgatgtggcagatgtgggtattgttggcgatgccatgaaagttctgccgctgttgatcgaggaaatcaaaaaaatcaaagaagcataaaaataaacaattacttcattctttttcttttaaaataactttaaaaatgttaatcctaatccatttttatacacatttttaacgattctcctaagaatcacaaaaaccggtgtttccgttatggggcaccggttttttcattgctaaacggagtgtagagtgcagtgattctgaaaagaagatgtcagcttgcgctgaccagaatcacgcaccaagtctcacgtgcgttcgacttgaataaacggaaatcgagttattttgtcttatcggctaaccaatcgctcgctaagaaaaaataactcgatttcctcaatttacacagagtctttttctactcatctgataactgcttggtgtaaatgtgtctatgctgtgctttctgttggtacatgatgtggtcagcttgttcgataatgtcgttgacgcacaaatccttgtgatctgtcgggatttctatgacaccaaagctgaatcctttcggatatggcttggtctctacatgttcaaatgtggtctgcatataggtgaagcgttcttttgcctgagcagcggtccagccttccataaccagacagaattcatctccgccgacacgggcgaaaatatcttcttttcgtatgaaattctttacggtctttacaaaatggcagatgtatctatcgccttctacatgtccgaaatggtcgttgatgtattttaaatgatccagatcacagtagcagaagatcagtggtttgttgtttttgaataattctgtcatttgctccgtaaggaagtagcggtttccaatgccggtcagaggatccagataagcttccgtcagcagtctttctctaaaggattcttcccgttcctgaagctgccgtgtcatggtgttgaaagcttccgaaaattccccaagataagaaacgctttgagagtagtcaccttttgctacctgttttgcctgccaggtcagatgatttaagtttgcgtgaatatttttcagattttcacataaaaaattatctcttggtggggtttttactgataaatttccacgggaaagagcttcggaataagtcttcatctcacgtaccgcacgttccagaaattgcagtcctaacccaagtttctggtatggttcatccagtttgaccacatccagcgtttgaatctgggaatcatacagaatactgcgtaaatattcaaaaagtaagtcacagtttttgtcttcactcataaaaatccttatccttctgattcaatcacatctgcacggaatcggcatacacgatctccggttgcccaacagtctatttcaatggcagagtatgattttccggtatatacggacagaatgccggagataaaaccttcctcataattacaaacggtttcaccgagaaccgggagaccggagcagtcggcatcttcggaaacggtcaaaatgattcgtccactctgttcatctatattttcaattcgcagtacaccgatttttaaatcctgcatttttgcctgaagttcactgataaatgcattcagcggttgatcaagattcaacatatgacgcgcaaagtattcgccgctgcgctgaccggcttcccggaaaatgtcgatttgtttttctttgccaaactgagcgatcagttcttctttgatggaatattccaacatacggtagaccagaaccggaagtgtttctcctaagttactgcggctgttttcgtcgtattgcagatattgttcgaaagaaatcggtttctgattttccataaaaatattatgctccataatgataaatctcctctttgcagcattgttaaaaaacatacaaaaattaatgatttctttaatgtttcaagtatatcatttcaagtttaaatatgcaaggaaacaggtgcgattttgtgaatggcgcgtgtgaactgtaacattcgatttgaaataggcgatagaaggaaaagcattgcgctgaggggtttgtatttttggcgaaaatcagttaaaatagaactgacaagaaacatagaaatggaatatattgattatgaatttattatcattggaaaatattacaaaagcgtatacagaacgtgtactgcttgacaaagcgtcttttttcctgcaggaaggggaaaaagtcggaatcattggcatcaacggaaccggaaagtccacacttttaaaaattgctgcgggactggaggaaccggatgagggaagctgtacgaaagcaaaccatgtggtgatccgttttttgccacagacgccggaatttgatgacatctgcaccgtctgggagcatgtggagaaaaaaatgtctgagagcacacagtgggacatggaaggagaagcgaaaagcatgcttcagacccttggtattgtccgattggatcagaaaatatcggagctttccggtggtcagcgaaaacgtctggcgctggcggagattttgatgcagccttgcgatattctggtgctggatgagccgacgaaccatttggatcacgccatggcagcttggctggaggattatctgaaacgctggcgcggcagcctgatcatggtaactcatgaccgttattttttagacagcgtgtccaaccggatcgtggagatcgacaaaggaaaaatctacagttacgatacgaattattccggatttctagagctgaaagcccagagagaggagatggaagcggcaactgaacggaaacgccagtcgatcctacgggtagaattagagtgggtaaaacgtggcgcaagagcccgttccaccaagcagaaagcccgtctggagcgttatgaggagatgaaaaaccagcatggaccgcagagtgacggacaggtatccatgagttccatcacaacccgtatgggaaatacgactattgaaattgatggcatcagcaagtcttacggaaactgtacttttatccgtgatttttcatacatatttttgaaaaatgaccgtgtgggatttgtgggaaccaatggatgcggcaagaccacgttaatgaaaatgctggcaggcagagaagaaccggacagcggaaccattaaagtggggcagaccattaagatcggatattattcacaggagatcgagagcagcaaagaggccggaattgcctatatggatccgaacatgcgcgtcattgattacattcgtgagaccgcagaatatgtccggacagaagatggtctgatcagtgcttctgccatgttggagcggtttttattcccgccacaggcacagtacagcttgattggaaaactttccggtggtgagcgcagacgtctgaatctgcttcgggtattgatggagtcaccaaacgtgttgatcctggatgagccgaccaacgatctggatatttccacattgacgattttggaagattatctggatcactatcagggcattgtgatcatcgtgtcccatgaccgttattttctggatcgtactgtcaatcgtatttttgcctttgaagatggtggcgtgttaaaacagtacgagggtggttacactgattatgccctgaaagcaggagaagcagcacagtgcaatctgtccgtgcaggacggaatcgtcggatcgtctaatacaggtttgaaagcaaatgcagatgtgtctgctgatggagcggcggagaccggcggccgtgcagcttatgacaactaccgtgcaaacagggagcgtaagctgaaattttcctataaggaaaaaatggagtatgagaccattgagcaggatattttggatctggaagaaaagctggaatcgctggacaatgagatggcagccaatgctaccaattccaaacgtctgtcagagctggcagcggagcgggaacagaccgaagcagatctggaacataaaatggagcgttgggaatatctggaagaacttgcagaaaaaatcaatgcacagaatgagaattagtataggtaataggtgtagaaagcaggtgtaagttatgaaacagaaagtaaagtataagggaatcatgtttatcgtattgtcggcactttgcttcgcgtttatgaatgtgtttgtacgaatggcgggggatctgcctgcggtgcagaagagtttcttccgaaatctggtggcgtttatcattgcgctggcgatgatggtgcgtcataaggaaacatttcaggtggaaaaaggaaactggaagtttatgcttctgagagcgatctttggaacgttaggaattttgtgtaatttctacgcagtggatcatctggtgctttccgatgcatccatgctgaataaaatgtcaccgtttttcgttattttattctcattcctaatcttaaaagaaaaactgacaccgattcaggtgactgcggtttgcggcgcttttatcggaagtctgtttattattaaaccgacatttttaaatatgaatctgatgccgtcactgatcggcctttgcggcggtttgtgtgctggaattgcgtacacgatggtgcgagtccttggacagcggggacagaaaggcgtatccgtggtactgtttttctcaggattttcctgcttagtgacgctgccgtacttattgttaaattatcatacaatgactatgtggcagggaattgttcttctgggagccggagtggctgcggcaggcggacagttcgccattacagcagcttattatcatgcaccggcgagagaaatctccgtttacgattattctcagatcatattttctgcgatcattggattcttgttattccatcagattccggatcggttcagtgtgctgggatatgtgatcatcattggaatggcggtttggatgttcttctataatcagcgccacgatgcagcagagataaaataataaaaaatatcaataatatcatagccattcaagtcgaacgcacgtgagacttggtgcgtgattctggtcagcgcaagctgacatcttcttttcagaatcactgcacatcctcgcggagcatttatctcagtcggagattgaactcccactgagaaatacttgttactactcaccacttgcagaagtgggagtctcaactcagactgagatgaatacacaattatctcttattctctcatatctttgtgcagaacacaagtaaaaagtgaaacttttatccgcgaagtcaggcatgataattttccatcaactttgtcaccacttcatttttttcagaccaaaccgcaataatgtcaatcccacgctctcccggaagcggaatgctattcaattctttacttccctgtatgatattttcagaaagaaaacaataccctcttccaagttttacataactaatctgcgttccgatattatccacgacttcaataatcccctcatccagatgcagcaattccatggtgtctaacgtatgttgaaacatccccgggctctgactttttttcaccagaatgcatgtctcatcctgaaaatcttcccaggaaagcttctctttttgaccaacctgcaatttttcagaataaatcaaagcaccttttctccatgcgattttctttattaaaaatcccggtctggtctgccaggacggttccaacgtcagccacagatcaatttttcctttttcaagatactcctgtccctccagaaaattgcatttgtgaatcaccagcttctgatttgacgcagcattcttcaaatattcataaaccgttggaaggaaatcatctgcatatgcgccatcaaaacagcccatatttagcaacggtttctgtgcgcgacctgccagtaccgcatttttcttggcattttccaattcttttaaaatattctgcaaatccttctgaaactgcataccagcctgtgtcagcaccaccccgcgtgcctgacgttcaaacagcggcagaccgatttcctgttccaaaagggtgatctgtttactcagagcaggttgtgaaatatagagtgattttgcagccgcagtaatatttccatgctctgccacacgcaaaaaatacgtgatctgttccaacctcataactacttcctccctttaaaacacaagtctacactgttttcttttcaaacgcaataatcccggggaaattaaatccccgggactattgtatttatcctaagttcaagaatgctccggcattcatgatctctctgatcgattagtctgctgtcttataagttctgtaagagaacagtgcatcaggactagccatgttcatcttatttctggcaggtgtcaactcaaaggaaattgtgcctgccgccatgttgtaatctgtaaataccggacgacatccctgtttcaactcgatagaggaaaactgcggatctctcaatgtactggcagctacagctggaatattatcaattgcaccatgtaatccccagccaattgtcacagatgtatcactgtcatactgtacgcttccacaatgactggcaatatgatatttaccatttttgcttgttaaatctgtaccgttgatcgcattgtaaaccttagcagttccgcttgtttcattaatacttacttcaatggtacgtgtacgtgtcgcataagcatttggtcctaatgcaacgctgacaaaaggtgctgtaccagtctgattatcaaatacgctgatctgtgtatttccgctgatcatacctttcgcatttttgtttgtataacgtgcaaaatgctgtccgaatgtcagagctttaaagtctttaccattatcatccttacggtcagtggtatatccttcatatcctttcagagtagaagccttgccaccaagaatccagtcgatcgcgcctgtatcaaaatcaaactggtaaactgcactctgatcacgcatggaaacaagaatcttgtctgtattgccgtttgcatctaatgtatagtccacactgtttacatgaacataatcttttacgcctgccgcaaagttatgatccgcatgatctttctgaccaacagatgcatatgcaccatccaatgtactctcatcataattgatagactctacagcagaatcatataataacggataatcacctgtgttgatctctttgattacttttccgtctttcacttcctgaatgattcccacccatacataagcagtatttccaccgtcaagaccttttacagtctccggaaggttgtctgccagtaccggtgtatagctgaggttgatgtaatgattttttccaagtacgacaaactcatgctgatccagatatccctgaccatgatagtgtttttcgtcactgtttgcttttaaagtagcctgatcaatatctacataattatcatccattacaagataataaccacttgagaagccacccatagcatttctgaatgtcggctcaagctcgatgaatgcagtatagtaacggcttccatcaacagcatcctgcgctgcaaagttctctgccatattttcagcatcaccgctacgatcatctactgttacttcatactgcggaatatagcgataatatactaattctccatctgtatttacacgaaggaagaaatgatccagtgcaaatgtgtatacacctgcatcagaggctttcacacctgttcctgtaatgtccattcccggaagcagctcatttacagtatgtacacgatactttttaccatcttccatggttactgtgataacttcatcttctggagtatctgctttgatagcagccggtgtaaaggatacgtttccatcaaccacctcaagatcacctgttttatcacttacggcagatgctactttgttgtcgcctgttgctgtcagattgatcttgtctccggcaactaatgcattcagatagtaatcaccttcggatgttttagatgctgtcagtacaacgccagaagcaccattctcgtctgctgctgcgatatcaatgtttgcagcttccggatttaccggatagttgttcatctgagcggcaattttctctgaataatcaaaatactgtgcggtattctgttttgcattcaggtaatcaatgtctgctacaaggttatcattgactttgctgttttcaatgacataacctttgccttctgcatccatgtaagcaccgttataatggaatgttacttttccgttttcgatcatccactgaccgtttttgttgcttgcaagtccgttatagccaaagtctacttttccgcctgccagataccaccagccattttcatttttttctacgctgttgcagtcaaagtttacttttccgttctcgattctccaccagccgttttcgtttttcgcgattccggtgtaaccaaaatctacttttccgttggtaatcttccaccagccgttctggtttttcgctacggtgtttgcagagaagtctactttaccgttgcggatcagccaccagccgttctgattctttgctacggtgtttgccgtgaagtctactttaccattgcggatcagccaccagccattctgattttttgctactgtatttgcagaaaaatcaacttttccgttctttacataccaccagccattttcgttttttactacgtctgtaccacttgttactttctgtccatttttgtaatactgccagttacctgctgaaattcttttcagtccggtataacctgctgcctgagccgttgttgtcagagcagaaggtgctgccacacctgtaaaagtaaggcaggcagccactgcgatcaatgcagccattacttttttctttttcatagaaaaaatcctccttcttcattgccgaacccctatgtccgatggctttattatacggtgttcacactttcttcacaaatacagaaaagctatccatccataaccgcaagttatggatggatagcttttctcttcatcttataattcaagaatgctccggcattcttgttgcgaggtgcgcgtcatgcaattgcatgacatacttcaact

SEQ ID NO: 13290 - DNA, 9177 bp, Unknown
  gut microbiota DNA sequence
ggaaatacaataatgtgttgtgtgaaaatgtgcgattgtacgattgcttatgagactgtgcaattgcacatttctattttggaggttgtatgcttacatttggaatcgattgggatgatgtaatttctcccttaaacgactgtgccatagaactggcgaatcaggaatatcagtttgacccgccgttgacactggaagatatcaattcctgggaaaataccgggcgggcatcggtaatcaaaaaatactataacgatccgcggctgtatgatatgcagcgggtatccgatgaggcaaaagcctttatccggaaattacagacaaaaggaattgtgtatatcgtaacggcagtgtatccacagtttatgtcaaaacgggtggagcagattaaaacagcatttccggatttcccggatgaaaatatcattatgggatttcagaaatcggtcgttcaggtggatattacgctggatgacggaccacgaaatatcctaaaaagcagtgcgcggtttccagtgctgatgcggcgaccatggaaccgggaactgacgggactattggcggttcacaattatgatgaatttttccagttactggatcagatcaaatcatccatgatcgaagaccgggtagaaccgaaggcaccttgtgtggtagctttggttggtccaagtggttccaataaaaatgagattacccggcgattatgcgaaacgggtcgttttattgtgccgaaagcttataccacaaaaaaggtatcggacagcatccatacgaccatcacggaagaagaatttatccgcgatagtgcagaatttgttgaaactacccgttatgcaggctatgcctacggcacgaaatggaaggatatcacatcattgatgaatggcgataaatacgtggttatgccaatggacttaagcggtgctattgccatgaaacggcattatccgacggtgatcattttctgtaaatgcaaacgagagcagatgatcgagagtattctggaaaaggatatggataaccatgaaaaaatgctacgtctggtttcgttggaaaatgaacttaaaaatgcggcattgtgtgattatgtggttcatacagaccgcgaagacgcggtggagcggatactttcaatttattctgcagtttgaaaatccgtatagaacagccaaagtgcaaagatcgtaagcaccacaccaaagactgcaaatccaacataactaaacatcagcgagatagaaatcagtcccgagaagaagcatccaataatattaaacacaatatgcaccggaatagagtaccggattccatgtccccggcggcacacccagccaaggaacagtcccatggcaaatgcataaatgccctgtatcagattcagatgtacaaatccaaaaagcagtgcctgccagatatttgcaaaccagaatggcattgcgtgtcttgcataacggaaaatcaatccacggaagatcagctcttcaatgatcggagccagaataagggaataaacgattagcattacagacaggtctgaatatccctgcgtttccatggtggcattgtattttgtaatccattccgggcggagtctgccgatcagatctgtcagaagtgttgtcacgtattgcagaccgatgccaagaaaaatcatggatacgatcgtatgaaaactgtagccggttggctgctttttcgggcggttccgaaacggtcttacaaatactctctgataccagataccaaaaacaagtaatgccagaataccgtatacgatatttaccgtctgcaaatactgctgattagaagttatatcagataaagaaccgaggatggcagcaatatcgccgccggcagcggaactatcctttagtgcaaaaattatcattaccggaatcgttgcaactacctgaaggataaaaagaaatatcataggcagcagacttttccagaaacatgccatttttttcataaaaaaatcccctttcataaacaacgggcggaaaaacgcccattttcatctatgactatcttatagaaaccatgttggtttgtctagcatatgacacaaatcttaaaaaaatcgtaaaagaaaatcccccttttctgtcgaaacggaatatgttagaataaagtacagttggcagaatcacactgcctttagagagaattattttgacggaaagaaggttactatggcatttgcacatttacatgtccatacagagtacagtctgctggacggttcgaacaagatcacagagtatgtgagccggatcaaggagcttggcatgacagctggagcgattaccgatcatggtgtcatgtacggtgtgatcgatttttatcgtgcggcaaaaaaggaaggcatcaatccgatccttggttgcgaggtgtatgtggcaccgggatcacgttttgaccgggagcagacaaaaggagaggatcggtattatcatctggttcttctggcagagaacaatcagggatattccaatttgatgaaaattgtatccaaaggatttgtggatggatattattatcgtccccgtgtggatatggaagtactggagcagtatcacgagggtatcattgcattatctgcctgccttgcaggagaagtacagcgttatctgacacgcggtatgtacgaggaagccaaagagaccgctttaaaatatgaaagatgttttggaaaaggcaacttttttctggaattacaggatcatggaatcgcggaacaggcgcaggtaaatcagcagcttcttcgcatgcatcaggaacttggcattgatctggtggcaacaaacgatgttcattacacctatgaaaaagatgcggaggcgcacgatgttcttttgtgcctgcagacgggcaaaaaactgagcgatgaaaaccgtatgcgctacgagggcggtcagtattatgtaaaatctgaggaagaaatgaaggcactttttccatatgcgctggaagcgattgagaatacacagaaaatcgcagaccgctgccatgtggagattgaatttggcgtaacgaaattgccaaaatttgatgtgccggatggctacacttcctgggaatacttaaataaattgtgttacgaaggtctggatgaacgctattccccggaacgggtgcgggagttaaaaccgcgtctggaatatgagctttctgtcattcagaaaatgggatacgtggattactttctgatcgtctgggatttcattcattttgccagagaaaatgacattatggttggtccgggacgtggaagtgccgcaggaagtctggtttcctatacccttggtattacaaaactggacccgatccgctacagtctgctgtttgagcgattcctgaatccggaacgagtatccatgcctgatattgacgtggatttctgttacgagcgtcgtcaggaagtcattgattacgttgtccgaaaatacggcaaagaccgtgtggtacagatcgtaacctttggtactatggcggcaaaaggtgtcatccgagatgtcggacgtgttatggatctgccttatgccatgtgcgacagcattgcaaaaatggttccgaatgagcttggaatcaccatcagcaaggcgttgaaaatgaacccggaattacggggattatatgagtctgatccacaggtgacaaagctgatcgacatgtcactacgtctggaaggactgccgcggcatacttctatgcatgctgccggtgtcgtgatcagtcagaaatccgtggatgaatacgtgccgttatccagaggctctgatggctctgtgacgacgcagtttaccatgacgacactggaagaacttggtctgttaaaaatggatttcttgggacttcgaacactgaccgtcattcaggatgcggtgaaaaatgtggcgcgctccaccggcaaaacgctggatatggatcacattgactacaacgatccggacgtgctggcttccattggaaccggtcgcacggaaggcgtgttccagctggagagtgcgggaatgaaaaacttcatgaaggagttaaaaccaaagagcctggaggatattatcgcgggaatttccctttatcgtccgggtccgatggactttattccggcttacatccgtggcaaaaataacccggattccattatgtatgactgcccacagttagagccgatccttgcgccgacctatggctgtatcgtatatcaggagcaggttatgcagatcgtgcgtgatctggcaggttatacccttggacgaagtgatctggtgcgccgtgccatgtcaaagaaaaaagcagatgtcatggcgagagagcgtcagaactttgtatacggaaatgaggaagagggcgttccggggtgtatttccaacggaatttccgagcagacagcaaataaaatttttgacgaaatgacggattttgcaaaatatgccttcaataaatctcatgcggcagcgtacgcggtcgtttcctatcagactgcgtatctgaaatattattatccggtagaatttatggcagctttgatgacgtccgtgattgataactccacaaaagtggcagaatatattcaggtgtgccgtcacatgggaattgcagtattgccgccaaatgtcaacgacgggtatgcaggattttccgtatccggaaaagatatccgttacggattgtctgccatcaagagcattggtcgttctgttattgacggattggtgcaggagcgtgaggaaaacggcaagtttaaatctctgaaagatttcattgaacgaatgactggcagggagttaaaccgccgtgctgtggaaaatttcatcaagggtggtgcctttgacggacttggcggtacgcgaaaacagtttatgcaggtatatggcagcatcatagatcagatcgcaaacgaccggaagacgaccatggcaggacaaatgtccctgtttgatatggttgcaccggaggagaagaaacagtttgagatccgtctgccaaattgtggagagtttacgaaggaagaactgcttgccatggaaaaagaagtgcttggtatctatgtcagtggacatccgttacaggaatacgaggcgaaatggcggaaaaatattacgaagaccaccggagattttaccctggacgaagaacttggtgttgcccgtggaatcaatgaaggggaaaatgccatgatcggaggcatgatcacggcaaagaacatcaaatatacaaagcagaataaggcaatggcttttctgacggtggaggatctgtacggaagtgtggaagtaattgtttttccgagacagtatgagcgttatcatgcactgatgcaggaggattccaaggtgtttattctgggacatgcttctgtggaagaagatcgcaatggcaaactgatctgtgacaaaatttattcttttgatgatgcgagacgggaattgtggattcagtttccggataaagagacttttgaaaagcaagaaaacgaaattttagcactgttatctggctcagatggacaagatcaggtcgttatttaccttgcaaaagagcgggcaatgaaacgactggggaaaaatatgagcgtatttgccaacaatgagcttataaatgaactaaacaaaaaagttggtgaaaaaaatatcaaagttttggaaaagtccattgaaaaaatgtaaaaaaaagtttagaataatagcaacatgaggaaaaaatgaaatgatacaggtataggaggttttgtcatggctaaggaaatacagacaattggtgtgttaacaagtggtggagatgcacctggcatgaatgcggctatccgtgcggtagtacgtcaggcaatctcaaaggggaaaaaagttaaaggtataagacgtggttatacaggtttgcttgcagaggacattgtcgatatggaagcaaaagatgtatcagatatcattcagcgtggtggtacgattcttcagacagcaagatgtccggagttccgtaccgaagaaggacagaaacttggcgcagaaatgtgtagaaaacatggaatcgaaggaatcatcgtaattggtggtgacggatctttccgtggagcacagaagctggcagcacagggaatcaataccatcggtattccgggaactatcgatcttgatatttcctgcactgattacaccattggttttgataccgcagtaaacactgcaatggaagccatcgacaaaatccgtgataccgcatcatcccatgagcgatgcagtatcattgaggtaatgggacgtgatgccggatatatcgcactctggtgtggactggcaaacggcgctgagcaggtgctgatcccggagaaatatgattttgatgagcagaagatcgtcaacaatatcattgcaaaccgtaaacgtggtaagagacattatatcatcatcaatgcagagggaatcggacattccacttctttagcaagacgtattgaagcagctaccggaatggagaccagagcaaccatccttggtcacatgcagcgtggtggaagcccgacatgtaaagaccgtgtatatgcatctaccatgggtgcttatgccgtggatcttctctgcgaaggcaagagtaaccgtgtcgttgcttacaaagacggtaaattcacagattttgatgtggatgaggcactggctatggagaagcagatctctgattatcagtttaatgtaggaaagaacctttctatctaacagcacatatatttaggtaatgattatgttagcatgaagaattgcctgaagatatagtgaaattgcaaatggataataagaaaaagcagtttacatcagcggatgtaaattgcttttttgtgcgtttctatatataatggaaaaagcggagaaagtagcaaagcgaatgaatttcaaagggtctgctttcgaaaattgaaatgaagtagaaaagggaaaatatatgattacaagtacatcaaatgcacaggtcaaggcactgagcaaattgataaaaaatgcccgggcgcgcagacagcagcaggcatatattgtggaaggtatccggatgtttcgtgagacaccagaagatcggattgaaaaaatctatgcatccgaatcttttgtaaaagagcatgagactttattggcgggcaaagactgggaaatgctgtctgattctgtgtttgcaagtgtttctgatacgaagacacctcaaggtgtgttatgtctggtaaaaatgagagagaatcgtctggaagacatgctccagcagaaaaacggactttggctgatcctggagaatgtgcaggatccgggaaatctgggaacaatgttccggaccggtgaaggtgcaggaatcgccggtgtgatcatggaccgttccaccgtggatatttacaatccgaaaacaatccgttcaaccatggggagtattttccgggtgccgttttttatcacagaggatctgcatgagacgatccgacagcttcagaacgcacaggtcagcgtatatgcggcacatctggaaggaagtgtctgctatgatactccggattatacaaaaggaacggcttttctgatcggaaatgaaggaaacggactgaccaaagagacggcagcacttgctgattcttatatccgcattccgatgggcggtcagttagaatccctgaatgcggcgatggcagcgggaattctgatgtatgaagcaaacagacagaggagagtataacatgtttcgattatgggcaaaagaatttaaaagtaaccgtatgctgcgggacacaacgatctgtgatgacagcgcggaaacccgcacacataaagtatttcatgcactggatgaagtgtgttacgaatttgatttaagcaaaccgatctggcttgacagtacgatcgaggaattcagacgtcatgcaaaaacaagattttatcaggataattttatagatcagattgattttgattttctggagatccaggtgattgaggaggattaaaaatgacagatggcacaacgcgcagaaaagaattaatgaaaatgctccaacatgagacaaaaccgttatcgggcacggaactggcgaaacatttcggtgtcagtcgtcaggtaatcgtacaggatattgcattgctgcgggcaacggaccggaatattttaagtaccaataagggatatgtgctatttcacccggagcaggaggaagaacgctgcagaaggattcttgcgtccaatcacggggaagaacggatgcaggaagaactgtatctgatcgtggataacgggggctgcgtctgcgatgtcgtggtggaacatgagatctatggacagctttccgcagatctgatcctgaaaaatcgtcgggatgtgaacgagtttgtcaaaaagatgggagaaatctctgacaagccgttgaatgtgcttaccggaggcattcatttccatacggtggaggcggaatcagaagaaattctggattgcattgaggaacaattgcgggaacagggtttttaaccaaatcaaggaagtcccctgcttcaattgcgaaaagcaataagcaggggtagggacttgcttgtatcaggaggggtgcaagccccttctgataagctgcgaagcagctatttggttatgagcaagtagcgaaggcggattgcgaatatcctttgactaaaaacaaaaagttttttgtgcttggctacgtgtgatatgattaactacaaaaatggcacaaagttcttaataaagtataaagaaacgcggaaaaggacaaaatctgtgcaaatttatgctataataagtgcaagagagtcaatatatttgtatgatcaataaacagcgcatgctggttatgaacgaatttggttcatgatagtctgcaaaaaagtcaggcggatagagagaagtatgattcacaggaggtgggacgagaactatggcagaggaagtaacagaacgaggggaaatcgtctacgactggcagaaccttatgtttttatataatgcagcgatcaaggaagtacgcacgaaactggacattatgaacgatgagtttcagtttatccatcagtacaatccgatcgaatacatcaaatcaagaatcaagacaccggacagcatcgcaaaaaaactgcgaagacacgggtttgagaataccatggaaaatatggtagagcatatcaacgatattgcaggtgt

SEQ ID NO: 13291 - DNA, 8337 bp, Unknown
  gut microbiota DNA sequence
tacatgaaacatccgaaagagagcggttaccgcagttatcatatgctgattaccgttccgattcagacgaccaaaggcatctgcccgacaaaggtagaaatccagatccggacgatcgccatggatttctgggcaagtctggagcataagatttattacaaatttgagggaaatgcaccgcagtatatcagtgaggagttgcgggaatgtgctgcgatcacatccaaactggatgcaaaaatgctgtctctgaatgaggcgatcattgcagagaaggagcggcagcagcgagaggaagaacagaaaaaatatcttaaataaaatgccgtcagaacgatatgtcagatcgctgtgacggtattgttttgtgcaaacctctgttgcgtcacatttcactccatgttatactaaagaataatgtttaaaagtaaataagaaagaatacaggaggacatcaatgagttcaattaaagatatcaaccttgctccgtccggagcacataaaatcgactgggtacgcaaaaactgtccgcttcttcgcagtctggaggatgatttttccaaggaaaaaccatttgagggtattcgtattgccctttccattcatctggaagcaaagactgcatacctttgtaaagtcctggcagcaggtggtgccgagatgtatattaccggaagtaacccgctctccacacaggatgatgtggcagcagcactggtagcggacggattaaacgtatttgcatggtataactgcacaccggaagaatatgaccagcatatcacaagtgttctggagaacaactgtaacattatcattgatgacggtggtgatctggttcacatgcttcatacaaaaatgcaggacaaactgcagtatgtcatcggtggatgcgaggagaccacaacgggtatcatccgtctgatcgccatggcaaaaaataacgagttgaaattcccgatggttctggtaaacaatgcagactgtaagcatctgtttgacaaccgttacggaaccggtcagtccgtatttgacggcatcaaccgtactacgaacctgatcgtggccggaaaatatgtcgttgttgcaggttacggctggtgtggaaaaggtgtggcaatgcgtgcaaaaggacttggtgcaaaagttatcgttactgaggtagatccgatcaaagccatcgaggcagttatggacggatttgacgtcatgccgatgaacgaagcagcaaagatcggtgatttcttcatcacagtaaccggctgtgctggtgtcatccgtgagcaggatttcaaagtgatgaaaaatggtgccattttatgtaatgcaggacactttgacgtggagattgatatgaaacgtctgcgtgagatcgcactggataccattgatcagcgcaaaaatatcgtgggatatcagatcacagaagataaatggatctatgttctggcagaaggccgtctggtaaacctggcagcaggtgacggacacccggcagaaatcatggatatgagttttgcaatccaggcactgagtgcaaaatatctggttgagaatgccaagaacctgaatgaaaaactgatcaacgttccgcgtgatgtagatctggaagttgccaacagaaaacttcgtttccttggcaagtccatcgatactctgacaccggagcagaagaaatatctgaattcttccaatattgatctgtaaggaaatgagcaaaaaaaggacgtataatatatgaagaaaagagttgtaaccgtattcctgaccggtctgctggcagcttccatgctgcttggaggctgtaccagcaaatcagagaagaaagcgttggaatataaagaacttggaatcaaacaattacagcaggaagattatgacggtgcagtagacagttttcagaaagcactggatcagtctctgggcaggattacggcaaatgaactggatgtctgctattacaaagctctggcgcagtacaaatcaggtgatgcaaaggcggcactggaaagttacagtgcattgattgattatgatgaaaagaactgggaagtttattatctgagaggcagcgtttatttatccgagggcgataaggacaagtgcctgaaggattatgagaaagcagtggagctgaacgcttctgatctgggtctgtatggacatatctgtgaaaacctgaagaatgcaggtgaggatgacgaagcggagaagtatctggaacagggacttgcgctgcaaccatccagcggtacggattacgaaaatgtcggttatctgtataccataaaaggagatacggaaaatgcagtcaaagcatatcagcaggcagtagaaaaaggcacagacagtgcgtctttgaagcttggtgagctgtattttgaagaaggaaacacagacgaggcgaagaaagcgtttgaggcatatatggagaagcatccggatgacgcagatgcactgacacatctggcagatattgcggcagagtccggggacacggaggatgctgctgcttattatgagaaagcaattgatgtggctgataagtctgatcaacagggacttcggaaaaatctggtggctttttatgaaaatgcaggtgattttgccagtgcgttaaaagaagccaaaagttatgtggcagactatccgaaggatactgcaatgcagaaagaatatgagtttttacagacacgtgtagaaaatagtacaggtgatgcgattgaaggaacggtagatgacggcacatcggcagatacatcatcttctgattcttccgctgcatcagatgcacaataactcccgattttattggtggagaaatcagacttatatcaatggtgagatatgatctcccatatgaaatggaaggaaacggacagtaagtgggaacaatatatgaaaatgaagcgccggtggagcgtgtcattctggtggccatcagtgaacgggatggagacgataccgttgcttccttggaagaactggcagagcttgcggcaactgcaggagctgaggtagtcggaaccgtgatccagaatttggaacatatgaatccgggcacttatgtgggaagcggaaaattagaagagatccgcgacatgatctgggaaaaagaggcaaccggaatcatctgtgatgatgagctttcaccgattcagatgaaaaatatggagcaggtgctggacagcaaggtaatggatcgtacgttgctgatcctggatatttttgcggcaagagcgagaaccagtgaaggtaagattcaggtagaactggcacagttaaaataccgggcaagccgtctggcaggttttggtcgttccatgtcccgtctgggtggtggaatcggaacgagaggaccgggtgagaaaaaactggagatcgaccgtcgtttgatcggacacagaaccgctcagttaaaccgggaattaaaagaagtggtacggcatcgtgaactgaccagaagccagcgtatgaaaagccatacaaaagttgcggcgatcgtgggttataccaatgctggaaaatctacgctgttaaatacactgaccaatgcgggtgtactggaggaggatcagctttttgcaacactggatccgaccactcgtgtactggagctggagaatcatcagaatctgatgctgacagataccgttggatttatccggaaactgccgcatcatctggtagatgcctttaagagtacactggaagaagcaaaatatgcagattttatcgtgcatgtggtagatgcttcgaatccacagtgggatacacagatgcatgtagtttatgcgacattacaggatcttggtgtaaccgataagaagatcattactttatttaataaatgcgatcgtgtgaccggagaagaaattttacaggattttcgtgcagataagacgttgcggatctctgcaaaaaccggtcagggactggataccttaaaggaagtatttgaagatttgctgcgggatggaaaagtactgctgaaacatacatttccgtatgaaaaagcaggagaaattcagaaaattcgaaaatacggagaattgctgaaagaggaatatacgccggatggtatttatgtggaagcatatgtgccgccagagttataatgatggtaaaataaatcatagttcacatgctatatgcacagaaaatgtggaaacacagtattgtgaaaaacgaataacagcggaaaggaagactgtcggggatgaaacttttaattaaaaatggaaccgtgatcaatccgggagacaggaagatcacaaaggcagatgtactggtaacagatggtgtgatcagcaaggttgcacctggtttgaaggatacagcagatgagacatacgatgcgaaaggctgctatgttatgccgggatttatcgatctgcacgtacatttgcgtgatccgggactggagtacaaagaggatattcagactggaggcgctgctgcactgcatggtggatttacgaccatcgtggcaatgccgaacacaaaaccggtggcagataaaccggatgtgatcaattatgttaaacacaaagccgaggcagttacaaaagtacatgtgctgcaggcaggtgcggtgacaaagggacagaaaggcgaagaactttccgatatccgtggaatggcagccgcaggaagccctgccatcagcgaggacggcaaatctgttatgaatgcacagctttaccgggaaggtatgaagatagcagcagaagaaggactggcagtgttggcacactgtgaagatattaacatggtacacggtggtgtgctgaatgcagatgcaaaatcaaaagagcttggttttgcaggcattacaaactctgtagaagatgttatcgtggcaagagatatcctgctggcaaaagaaaccggtgtgcgtctgcatctgtgccattgctccacaaaagacagtgtgcgcatggtagaactggcaaaagaagaaggacttccggtaactgcagaggtctgcccgcatcatttctgcatgacttccgatgatatcacagaagatgatgcaaattataagatgaacccgccacttcgtaccaaagaggatgtggaagcgttaaagaaaggtctggcagatgacatcatggatgtgatcgctaccgatcatgcaccgcatgcagccagagaaaaagaacagggcattcagaaagctccgtttggaatcgttggattggagacagcagcagccctcacctatacagaactggtaaaaccgggcattttgactccgatgcagatggcagagaagatgagctacaatccggcaaaagtacttggcctgaaaaaaggtactgtggcagaaggaagccatgcggatctgacgatttttgacccggaatatgagtgggtgattgatccggaagaatttttatccaagggtaaaaatacaccgtttggcggcaaaaaagtaatcggaaaagtcatggcaactatcgtagatggcgagatcgcatatcgggagaaatagtgcggactttcagaaaaagcaagttacaaaatagctgatatttaaaaaaacgaaaattacagtttaaacgtattagttataaaatagctatttgactataagtacgtggattacgaatatcagctttatagaataatttcataaagaggagaacgagacacaatgatcaacaagttagtagaaaaaatcaaaaaaacaggtgcaccgattgtagtcggcttagatccgatgctttcttatgttccggagcatattcagaaaaaatcttttgctgagtatggcgagacactggaaggtgcagcagatgcgatctggcagtacaacaaacagattatcgacagcacctatgatctgatcccggcagtaaaaccgcagatcgccatgtatgagcagtttggtgtggaaggtctgaaagcattccagaaaaccgttgattattgtcatgagaaagatctggttgtcatcggcgatgtaaaacgtggagatatcggatccacatccgctgcatacgcaaccggacatcttggaaaagtccaggtgggaagcaagacatacagtacgttcaacgaggatttcgcaactgtaaatccataccttggaacagacggtatcaaaccatttgcagatgtctgcaaagaggagaaaaaaggtctgtttatccttgtaaaaacatccaatccgtccagcggtgagttccaggatcgtctgatcgacggaaaaccgttatacgagcatgtagctgagaaagttgctgcatggggcgaggatgtaatgggtgatgagtacagctacatcggagctgttgtaggagctacttatccggaagttggtaaagtattacgtcaggtaatgccaaagagcttcattctggtaccgggttacggcgcacagggtggaaaaggcaaagatctgactcattatttcaataaagatggtctgggcgcaatcgtaaactcctccagaggaatcattgcagcttacaaacaggagaaatacgcacagtttggcgcagagaacttcgcagatgcttcccgtcaggcagtcatcgacatgatcgaggatatcgcttccgcattgaaataaggagaacaacatggcagagaaatttaaagagcaggcggtagttatcagccaggagcagattgctccggcgatttacagcctgtggatcaagacagataaaattgcgcagtatgcaaaggcaggacagtttatttccatttactgtgacgatggaagcagattacttccgcgtccgatcagtatctgcgagattgacaaagaagattcttccctgcatttggtataccgtatcgcaggcaagggaactgcagaattttctgaaaaacagaccggagatcacctttccgtcatgggaccgcttggaaatggtttcccgttaaaaggcaaaaaagcatttctgatcggtggtggaatcggaattccgccaatcctggagcttgcaaaacagttaaattgtgagaaacagatcgtccttggataccgcaacagcgatatgttccttctggacgagtttaaaaaacagggtgaagtttacattgccacagaggacggcagtgttggaacaaaaggaaacgtgctggatgcgatccgtgaaaatgctttagatgcagaagtaatctatgcatgtggtccgactcctatgcttcgcgcattgaaaaattatgcagctgagaacaatattgagtgctggatttctatggaagagaagatggcatgtggcatcggcgcatgtctggcatgtgtatgcaaatccaaagaagtggatggacataccaatgtacataacaaacgtgtctgcaaagagggcccggtatttttagcagaggaggtagaactgtaatgaacacaaaagtaacgattgcaggagtaacatttgacaatccggttatggttgcctccggtaccttcggttccggtgaggaattttctgaatttgtagacctgaaccgtctgggcgcggtagtcaccaaaggtgtggcaaacgttccgtggccgggtaacccgactccgcgtattgcggaagtatacggcggcatgctcaatgctattggtctgcagaatccggggattgatgtgtttgtctccagagacattccgtttttgaaaaaatatgatacaaagatcattgtaaacgtatgtggaaaatccaccgaagattactgtgaggttgtagagcgtctggcagatcagccggtcgatatgctggagatcaacatttcctgcccgaatgtcaaagagggcggaatcgcgttcggtcaggatccgaaagctgttgaggcaatcacaagagaagtgaaaaaacatgcaaaacagccggtgatcatgaaattaagcccgaatgttacagacattactgtgatggcaaaggcagcagaggcaggcggcgcagatgcgctgtcactgatcaatactctgacaggtatgaagattgatgtcaacaaacgtacttttgcgattgcaaataaaaccggtggtctgtccggcccggcggtacatccgattgccgtacgtatggtatatcaggtggcaaatgctgtaaaacttccgatcattggaatgggaggtatccagaatacagaggatgcgttggagctgatgctggctggtgcaactgctgtcagtgttggaactgctaattttgcaaatccgatggtgacgatggagatcgtggatggtattgagcagtatatgcagatgcatggggttgcggatatcaatgaacttattggttctgtaaaataaattcttgtttgtcttttaaggaacaagatggaaaaactccaatgcaggcacgccggatttcctatcttcgctg

SEQ ID NO: 13292 - DNA, 307 bp, Unknown
  gut microbiota DNA sequence
gaaaatatgcagcgtagctactcgaagaaagcttttccgtgggataatgcatgcattgaatcctttcattctattatcaaacgtgaatggctcaatcgctttaaaattcgcgattataagcaagcataccagttgatttttgaatatctggaagctttctacaatacgaaacgaattcacagccattgcaactatatgtcgccaaacgaattcgaacgagtgtatgaaagaacgcacactgaggctgagcttctggcaggttaaaatggggagaaatttctcattttaacttgtactaaatcttgac

SEQ ID NO: 13293 - DNA, 1170 bp, Unknown
  gut microbiota DNA sequence
cttatctttagtttctttaatttctgttgttctgacatcatacttccccttgcagttcaaaaatcgcaatccgctcccgtggatcatttcccgggaacagatctctgcagtcaatttcatccacaaacatcagctcattcactgtcatcatataagaaatgtattcgtccgtcggataatagaaaaacaactgtatgttacgcggttttgcataataggaatccaaaatacgtcccattacacgttttaaaagttccaacgaaaacggattaaaaaagtaacaccgatcaacgttttccggtacttcaaatgtttctgcattcgcctgcacaaaatccacacgaccggaagctgccgaatccgctttattttccagtgcacgttcaaacactctctcatcgtattctacaccgatggaatgacatctggtctgatacgacaaaaagaaatccacgcgacctttgccgcatccataatcgatcaccgtatttcctttgcggatgtaaccggcatttgccagacgttccaacacacaatatggtgtcggttcataaggaaatctatgctggtcggaatgggaatcatcccgccccatggttcgaatatgcaaaagtttatcccatcttgtttcgtttttatcttctctcattatccatcctcaattactttattgcatttgccgttttattttacctcttttcttctactacaatatatttatggttaatatcccttacaaccagtaaggaattatccatcttgttgcttaagctgtataatgatggagcaataggtctgacgtttttcttcttggacttcgcgtccgtaatttagactgacaaccagctcctcattcgcagcattcgttttatgcaggttgaatcgcctcaggtgcattcgtgtcacaccacagtagattgaataggcaatgagtaaaactggtacttatccattgcaataatcttaaggagtgacaaatttatgaacgcagtaggtatcgatgtttcaaaaggtaagagtatggttgctattatgcgaccttttggaggaattgtttccacaccttttgaaataaaacacacaaccagtgatatcaattcacttatagaattcatcaactctgttgaaggcgagtcccgaatcgtaatggagcatactggacattactat

SEQ ID NO: 13294 - DNA, 16523 bp, Unknown
  gut microbiota DNA sequence
aagaaaaagtaacaaagctggtggtttcgggtttttccggagatctgccgggggtacatcttttacatgaatggtctgaatctgaaatgggacagcggctcagacagatattgaatgcagaataagcattcaccgattctggtgggtagagcactaagcggtggttagtaaaaagggggaatagaatggaggctccatggcaagagatcaaaagacaggtgatggatggacttgatatgtccagagaatttacggatgaagaattaagagagcgaatcgcgctggcagtacgaagttacagcaaagaaaaactgctgtcgctgaaagtgcgggaaagttatgaggaacagatctttaattcttttcgcaggctggatgtattgcaggaactgctggatgatccggaagtgactgagatcatggtaaacggagaggcgcatattttttatgaaaaggcgggggcgctgtatccgtggacaaaagcagaactttccagagaacgtctgggtgatatgatccaacagattgcaggaagtgcaaaccgggcagtgaatgaagcaaatccgattctggatacccggttgtcagatggttccagagtaaacattgtgttggaaccggtatcagtggaaggctcttgtatctctatccgtaaattttcgaaaaaaccgatgacgctggagcggttgatggaactggagtctttatcacaggaagtcgcagagtttttaaaacttctggtgcaagcgggatataacatttttatttccggtggaaccggctgcggaaagacaacgtttctgaatgcattatctgcctatattccaaagacagatcgggtgatcacgattgaagattcggcagaacttcagtttcagaatgtgccaaatctggtgcggctggagacaagaaatgccaatggacagggagcagaggaaatcagtatccgtgatctgatccgcacggcgcttcgaatgcgtccggatcggatcgttgtgggggaagtccgtggtgcggaagcatgggacatgttccaggcaatgaataccggacatgatggttcactttcaacagggcatgccaacagtgacagggacatgctgctacgtctggaaacgatgatggcaatgggggaaaaggttgatttttccgtgattcagcggcagatcgtaacgggactggatattctgatccatcttggaaggatgcgtgaccggacacgaaaagtgcttcagatcagtgaattgtgtgggataaaaaatggtgagatctatctgaatacactgtatcggtttcaggagactggtgtaaagggggaaaaagtgcatggcatctggaaaaaagaaagttctttgcaaaatcgccagaagctggaagaaaaaggactggcatattccggataaagcagttgatgttttaaaaggaattggtgttgggatggcagcagcatttttgttctatcgttcagcatgggcattggtgctcattgtgccggcagtcatcgcctgtgtatgccgtggacggacacgacgggagcaggaacagataaagcggctgcagcggcagtttcagtcggcaatgcagtctgtgtcgggaactcttggagccggttattcactggaatatgcctggcgttatgcacagggtgatatgcagcggttgtatgggaaggatgcggatattgtgcgggagtttgcatacatgaaccggaaaatacaaatgagtgaaccgctggaacaggttttttacgaatttgcatgcaacagcggaagcgaagatatttaccattttgcggagatcctgctgcatgtgaaacgaagcgggggaaatctgactgagatcatacgcacgactactgtaaaaatgcaggaaaaaacagaggtattacaggaaattgaaacagcggtggctgcaaagcgggcagaacagcgcatgatgatgattttactgccggttattttgctttttattacactgagttcaccggaatatacaggggcattgtataaaaatctggcaggagttttggtgatgagcgcttgtctttgcggatatctggttgtgtttttctggtcggagaaaattgttcagattccggtgtagaaggggtgaagatgcgaaagtggaagagttggaaggaacacaggagcagtattttagcagtggcagtatttacgttgctgtcagtgatgctttttatttcacaaaattatgggggcgaaccggaagggacggtttcgcggcaaggagagggagaaccgacagaaagtcggacatttacatatgagacggcagatggggaatcacaacagatcgatcttgaggtacacccggtggagcgggaaaatgcagaggtacagcagctgctggaacaggcggtggaagaatgggaagcggtatttctgggagaaaacaaatccgaaaatgagataaccggaaatctggttctggaaaatacattttgtgacgggttggtgcaggcggtatatgagagcagcgattataccgtgatacaggatgatggaacggttgcaaatgaacaggttggggaagatggtgtgatcgtaacattgcaggcggagttttcttatgcagatataagccgcacggagattcgggcattgcaggtaatgccgcccgtgcaggggagcagtcagtggctgagacagcaggttcagaagcaatctggaaaacaggaagccaaaagccgaaccaaggaaacgtttcaactgccacagacagcggaaggacagaaaatatactggaaaacaaaagaaacatcggactggtatctgcttttgctgcttggaggtgcggcagtagtttgtctggaatggcagaaaaaggatcggatcaggcggcaggcaaagcatcgggaagcatgcctgaaccgggaatatccacaaatggtagaacaattgtcattattgatgggagtcggacttacgctgcgaagaacttgggagcgtattcttgaaatggatcggaaaatgcaaaagaagaaaggctatgtacagcgtatttatatgaaggaaatgcatcggacgtatctggatatacgaaaaggaatgggggaaagagaagcctatgagcagcttgcacgccggatcgggttaccgtcgtatcgacgactggtatctattttaaacagaaatctggaaaaaggaacccgtgacgtatgtgaaatgttgggggaagaagcacgggaagcctgggagattcggaagaatcaggcgagaaaggcaggagaagaagccggtatgaagctgctttttccgatgatgctggtatttgtactgattctggttatgttgttattcccggcagtgcagagcttttctttatagctggctgctgattgtagaaagctaaaagcactttggactatgcattgttaatttgggcagcatgtcacgagaaaccaggcaaaaatttgccggttgtcagtggaaacaaatattgggtaaaagataaatgtatggagggaaacatgggacaggaatatatcagagaaggaaaacgttttttatatgaagaatcaggtattggtgttgtggaaattatcttgattttggtcgttttggtgggtttgattttaatttttaagaagcagctgaccagtttggtaaataagacatttaccaatatcaataacaaagcaggaactctttgatgaaacagagattttgcagcggaagtgtcagtattttctatgtactgatacttgtgggacttatatccgtgctgtttgcgtttctggaggcagcacgcgtaagtgccttaaaaacgaatgtacatctgcttaccggacaggcggaagatgcggtgtatgcgtcctatcaaccggagttgtgggaacaatatcatttgctgttctgggaggagccaggagaaggaaacaccggtacatttccggaagtctgcaatttacagaaagatgcggtagagcaaaactgggaaagccagcagtttggacacaattttttcttcctgcaggctcattgcagcaaagtagaggtggaacagtatcaactggcaacggatgacaacggagccggatattatcagcaggcggcaaactggatgcggcagaatgtcgcggaggatgtgttgaaaacggtattgcaatctgtgacagagtcaaagaccgatggtctggagcagcgtggagaattgcaggaacaggaagtttttcaggcgttagagcagatggatcaatccgggaaaactgcacagaccagggagctgccagaagaaaccggaaatcaggagcagacacgggttttggcagaagctcaggagataaaggaagcagaagttgatgcagggaaaacaggtgaaaatagtcgtgtggaacttgcaaaccgttctgatctgcagaatccgctggaatggatgaaagctgtcaaaaagaatggagtacttgccttggtgatgccggaacaaaatgtgtcaaataaggaactgggtcagacagagggagtaaaccatacgcattcagcaaagggaagctggcagcaggaaaaaactgcgtcagtaacggatcggctgttgtttggtctttactgccgcgcacatttttctgatgcaacgcaggagcgtggagaccgggcattggattatgagatggaatatctgattggtggaaaaaatgcagatcaggaaaatctaaaggcggtagtcaatcgtttgctgcttatgagagaaggcgccaatctgctttatctggagacagattcgacaaaaagtcaggaagcaatgagtgttgcacttgcgcttacttcggttgttgcgaatccagagcttgcagaacccgtgaaacatgctattttagcggcttgggcgtatgcagaatccatcagtgatgtgcggatcttgttgaatggaggaaaagtgtcgctggtaaagaacgatacgcaatggcatacagatttgaaacatcttggagatgcgttgaatacttcagaaaagaacacagagcaggaaggattaagctatgacggttatctgcaattgctgctttggacaacgtcggaggaaaaaataaggcagcgatccatgaatctgattgagcaaaataccggtgtctgtatgaatcaaatggcaggaaaaataaaatgctctgtggagtatgaggcacaaccattgttctggaatctggtgcagcttggaaataacgagattggcagctatcattttgcagaagatagtgaagtatgttatgcagagtcaaaaaagtaaaggaggcgggtatattacagtgcttttgtatcgaagaaaaacaaataatacaaaatctctctctatgttctccgggcaattgcaaacttctccaattaatcaaacaggcaatttaaaaaatacaaaagcactgcaatatgcccgtcttccgggaagccttacactggaagcagcacttgttacaccattgttattgttttttgttctggtatttttacatttgtttttattgcttggagcacatattcaggtgtctgccgcgttgcagtacacagcgcgaagtatggccgcttcttatacagatgcggatgaaccggggacggcagaaggatatctgacggcgcggcgtctgttctggaagtatatggaacagcaggaacttttatcagatttatatagaagaaaccggtcagaaatatcgttcatcggaagtgatttttccggagattttatcaaactgcatgcaacatatgaagtgaagcttccagtgttctggacaaaatggggaaaactaccagtgaaacagcagatagtatgcaaaaagtggacgggagcgtcactatcatctgctggggatgaggatggagcatatgtgtatatcacaccatatggaaatgcatatcacagttcggcagaatgtaaaacgttaaagttatcgattcggagtgtgccacggacgggaatcagtgcgctcagaagtgaagatggaagcatttattatccctgccgctgtgcaggaacatcttctaagaatgtgtatattacagattatggcacggaatatcatgggaatattgcctgctctggactgaaacgtacggtttaccgggtattaagatcacaggtcggggatcggcacccgtgtatgcggtgccagaagtaaaaatggttcacaagtttttcgtgtgttcgatttgaagcgtatcagatggggagcattcttgaactgaatgatgcttcaggtaaacttgatctgaacatatcgtgacggggggctatcaagaaaaatgtaattattgaagggagaaaactatgacagagaaaataggaagtatcattggaacaccagtattgctattttttctatattgctgtgcacgggaagatcatcgattgaaattgctttccgtcaggcgctttttggtgtttggtggaattgggttgatctggtttttgatatgtaaaccgttttcgtggatggaactggcaggaggagcgggattaggactggtattgctttgggtgtcacatgtcagtaaagagcagtttggcgcaggagatgcatggatattttttatcagtggtatgttccttggggcggaagaaaatatgaggttattgttgtggtctttgattatttgcggaatttacagcatggggatgcttttgttaaaacgaagatcacgaaaggaacggattgcgtttgctccatttgtactgggagcagaagtattgctgctcctgagaaaatgtcagtttaggcgaggatctctgaccgtggaagcgtcattgatttttccagtattagtgctgctattgatgtttttcttgcatacaacgatttccggttttatgcaggtggaaaaacaggcagagcaaattcaacaacagcaggaattggatacgacagcggtgttctggaaaaacatacatcagaataatataaaagaaataataacagacagtatcaaagaaagaacggaggcagaatgaaaacagaatatctgagaacggcaagcaacagttatatgatcatcaaagatgccgaatatttatttgaaccttatgaattacagatggtattacgaaataaaatggagcatttactgtccatgcagattatgatatcggacggaaagacagaatactggtatgatgtgaccggcatgcagtctctggcgcaaaaactgaccatgcagactgccggagggacacttgttcgaaaagtggcggaagaaatctgtggtctgaaaacggagctggaagaatatctgctgcaggacacggatattgtgtatgatccggaaatgatctttatggatcgaaaagagacatcggtgaaattttgctacattccaggttttggaacggcgaaaaaaggcggtgtcaaaagccttctggaaaaatttttgcagcgcctggatcattcggatgccgccgcagttcgtctggcttacggactatatgaacggtgcgaaacggatgatctgacgttgcgggattattatgactgtctttatgggaaaaaacaaaaagaggatgaagcagaagaacggcggatggatgaaatgatgtatgccaaggcagctgaaaatctggaacgaacagagcagagacattcggaggatatgcttgaactgatgaaagaggagaaggaacaaccgaaaaagaagcgacgccttttccaccgggaaaaacgcaaaatgctggatcggtcatccttcacgtatgatgtagaaccggaagaagtggaaccttttatggttgcagaacgaaaaccttccgaaaattgggaagaaacagtatgtttttccgcggtagaacgaaaaacggtatgggtgttggaatataaaggagacggactggaggatgatcttcggatggaacagtttccatatcggattggcaagcatggaagtaatgtagaagggaaactgtatgcgcagacggtcagtcgcctgcatgcacagattacacaggatgaggattctaatttatggatttcagattttaattctactaacggaacgtaccttaacggacatctgattcctatgaatacaccagtgcgtatacaggaaggagatcgggtaatcttcgcgacagaggaatatatattgaaaaagaagtaaaaaatgaacttagtcttagtgcatatagtgagtagaggggaattttgtattcattgataacatcgattgtccagtggcacattcgacttgaatttttatgggaatttttttatactgaaaccaaatagtctactgagaaaagaacaggaggtttcagtatgaaggacgataattgtattttttgtaaactggcaaacaaggatattccgacaaatattatttatgaagatgacagatttacagttattctggatgcaagtccggcaacgaaaggacatgcgctgatcttaccgaaaaaccatgcggcaaatatttatgaattaccggatgaggatgcgtcagcagtatttgttctggcaaaaaaactggcaacaaagatgacagaaatcttacactgtgatggatttaatattgtgcagaataatggtgaagtagcaggacagaccgtatttcatttccatatgcatttgatcccgcgttatctgaatgatggcaatcaggataaactgacctggaatcatgcagaattcacaccggaagagattgcggagatcgcagcggaattgcgtgcataaaaatcttgtttatggatggcttaaaaatttaggctatgaaagcgccagtcatcaatcttacctttgctgctaacaaacgcatgcagatgtaagattgcctgactggcgcttactttacttttcgcaatgagtgaaaagctttcgtgatattatttttgtcgatctttaagaaaatgaagtgaaatcttatatttctgttactggaaaatgtttatttcaacttccagtccgcagtttcagtctgcagtttgacaagtcgtgcatatttcccatttttcttcatcaattcatccaaataacgaaattacagctgtggcatcaggtacgatggcggcagttttttttgcaatttcttccgatggtacttttaaatccgggatacataccaccgggatattcgcattggatgccgctaaaataccattttcggaatcctctagtacaagtgcatgttccggtttgatatccgtacgttgacaggcagcaagaaaaatatccggatttggtttggaacgctgtacctgatcgccgccaatgacaaaagcaaagtttttatcgagttttgccagacgcagatattcaacaacaatatcatgttttgtggaagatgctacacagcatggaatattgttgcttgcaaaccatgcgagaagttccggaatgcccggttttaccggcggtccgtcgcggcggattttttcggtgacaagtgtacggcatttctggctgatttcttctgcagggtaatcatctccgtaaagtctgtgcagaatgtcaagtaattgctgtccgcaggttccgagggtatggatgtaatcatctttttgctgggtgtaaccgtattctttcatgacaccgtctttggtggtcatgaaaaggcgttctgtgtcaaaaatcagaccatccatatcgaaaatcgcaagtgcgggtattgctaagtgtgaagtcataaatttgcctttcttttaaaatataatatgaactataatccagtatacaggaaatgagcctgaaagaaaatgataaatcacttctctcagacccatttttatatcagatgggagatgactcacacctctataggtggtgagaaacaagctagtatcagtggtgggagccaatcccccatctgatatagcctccggcaggagtacagaggtgcgcagttgaagtatgtcatgcaattgcatgacgcgcacctcgcaacaagaatgccggagcattcttgaatatatgcatgtatggtttaaacactttcaaattcgtcgataatctcctgtgatggcggtgcagtcagaaggctgacaattacgatcgcagctgcggaagaaaggaatgcaggcagcagttcgtagataccaagcagtccaccatgcggtgcgatcaggaatttccagataaataccatggaaccgccgacgatcattccggcaagggcaccgtttcggttggaacgtttccagaacagtgcaaacagcataactgcaccgaaggtagcaccaaatcctgcccatgcgaaggacacgatacggaatacggagctgtccgggttacgagccagaaatacgctgatagctgcgatgatcagaacagtaacacgtgccattgtcatagattgttttttcgtacatttgattccgaagcaatcctgcagcaagttttctgaaatactggaagatgctgccagaagctgggaatcagaggtagacatggtacttgcaaggatacctgcaaggatcagaccagccatcagtacggcgagaaatccgtgattgctcagcaggactgcagttctgacgatcagtgtctctgactgagaggaattctccagcacgtccatagcacctgcttttgtcatggcgtttccgataataccgataaagattgcgataaacatggaaataacaacccagacagaagcgatacgacgggatgtttttaatttgttttcatcttcaatacccatgaaacgcagcagaatgtgcggcattccaaagtaacctaagccccatgccagagtagaagcaatggtcagtccgttgtacggagtcgttccaccagttgcggcatcgtgggacattgtcatgttcaaataacccttcagggactgggcatttgtgataacggcatccattccaccggccatatgtacaccgtagatcagtacgacgatcagggcaccggtcataatgatactctggatcaggtcggtggtacttgctgccaggaatcctcccagagaggtgtaagctacgataataacagcacttacgatcatggcaggcatatacggtacgccgaacagtgtggcaaacagtttgccgcaggctgcgaatccggatgcggtgtacggtacgaagaaaattacgatcataatcgctgaaatcgccagcagggaattacttttgtcccgatagcggtttgcaaaaaaggacgggatcgtaatggaattgtttgctttgtgggaatagcggcgcagacgttttgcaacgatgagccagttaaaataagttccgatggcaagtccgatggcggtccaacctgcttcagcacagccggacagatatgcgacacccggcagacccatcagaagccagctgctcatgtcggaggcttcagcactcatggcggtcacaaccggaccgagttttctgccacccagataaaaatcactggtgtcgttgttttttctggaaaagagaacgccaatcaataccataacacccagatagatgatcatgatgatcagcattccaattgtgtttgcgttcataaaatcaatctcctttattacgttacttcaacaaatttctgccagtataccatgaataaaaatagactgcaatacagaatgaagtatagactatagtatagaaaaattgtgaaaaatatgtattaaatatgctaaaataaaggaaaaatgaaactagactaaaatatgaaagaaaatatagaataaaaataaatacaaaagaaaacggtattttaacaagagtaaaacaagaaaaagaggaatttcataaatacatcatcccccaaaatacggttgataaaataaccatccttattgattataaatgatgatataaataaaatagactaacagtataagttaatgataggtgctgttataaataaaataggctaacagtgtaagttttacaaatcataatatgaatgaaataaactaacagtgtaagccaatttgaaaagttaatatatgtattaatttagaaatatctttattacgaatcattgcgaatctgtgccagatagatcggcatcgccgtggaaccataagttttcagtgaatactccccattgcagatgcaccagtcataaagcaacgcacgctccgcaatcgcatacagttttaccatctcattgacggacagatccgtgcggaactccccgctttcctgcccttcccggataatgcggcgcaacagtttataatagtagcggttgcggtccagcagatgtttttccccttttgtaattaattgagtggataacagtcgcgccagcagatccagagaaatactgttttcaatcatggaaaaaagctcctgattcagatagatcagctgttcatagcgggtagcaaactgatccagctgagcttccagttccgtatatttttcatcaaaaaggaaagaaagggagccaagcagggcatcttttccctcaaaataatgataaaaagaacctttggatgtgccggattcggcaatgatctcatcaatggttgtgtcatcgtatcccagttcgtaaaacagtttccatgcggcagaaataatttttccttttgtgttgcgcggttgttttttgctcatatataaaatcctttcagaaaataaatacaggtggacaaaatttgaatattcaaaaatgttccagacatgcttactgcgggatgttcgtcgtgcaatgcatatcctgaaaaatgttatgaaaacagttatattgtagcagaaaaaatgaaaaatgtgtgaaaaaacggcaaaaaagtggtgacgggttgtgagaaatagacaaaagtggtaaaataatatcacagttcacgtatcacatatattttgttgacgactacattcgcatgaggagttaatgggatgtatcgtggactttaggaagaattttggaggaacatttattatgaagaaaatcgtaggaagactgctgagtgtgttgttgatcgccatgctggctctggcaggatgtggaacaaaagatgcaggaacagcaggtggaagtgcttctacagagactgagcaggcttcggtaaagtcaaaggtgaagtttgatggaacatacacagccggggatactgtaaagattcagatggatcttacgaaagaaggaacctgtgattatggatatatcggaatgtataaactggttacgaatgaggatggaatgaggatcctgaacctgatctattatggagaagaaaatgcagaaaacagcagcgacagccagcttgcatatgattcttatgcaatccagcagaatgaagatggcacttacacccgatgcaaatacacagaaggcgagacaccagatttttcaacaggaacacagatgagctgtgccagcggtgatgatcagatcatgaatggagagcagtttggcgcagagtatacatccgatggtggcgcttttgtaaaactcaatgaagacggaacctttatgtttggtgtccacatgaactacgcagcagacaaaaaaaagtttgaactgattggtgcaagcggatcatccgtatatacttatgagacagacgatgaccagaacagtattgttctgagtaacgaggatggcaatacagtaatgagccttgaacggaaggagagttaagttatgaaaccagagggaagcaacgtaagctatagagacttggcagaacgtttttatgcattggatacagaagtatacaaagcatccggaagtgaattggggaaggtatttccgggaccaaaacacatttccgaaaaacagattctgaaagattttgaacatgatgacacggaaaaaatcaaggacgaactgatcctgatcggaaatatgatcaagatcattcaggagaatggtggacgctatgaagaatttttcattcgttatgaacatctgtgcaaagatatcatggatgttttagaggatgatggattccgtgatcagattaccagagattttacaaaagatcattttggactgatgtacaagacagagaagaaccatatcgtaatctgcatcgccagagagacaggagcaggcggtcatgagatcggctccagactggcagaacgtctgggattctctttttacgatgattccgtgctggatctgatgatcgatgaactggatgaaaaaatgccgggaatcggtggcaaagatgcacattttatcaagcagagccgtgtgatcaaatctatcgcagaagccagtgattgtgtcattgtaggccgtagctgcggtcatgtactgatgacaaataatattccgcgtctgagtgtatttatcggggcaccatatgaaaaccgtgtgcgtagaaaaatgctgatcaatgatcaggggcgcaaagaagcagaagaatttattcgcaagacggacaaacgcagaagaacttcctatgattattacactggtaaaaaatggggcaacccggcagattttgatatttgcatcaacagtgcatgctatggcattgaaggaaccgttgatttactggaaaaattggtaaaatattcactggagcagaaatagaattgatctcagtctgagttgagactcccacttctgcaagtggtgagtagtaacaagtatttctcagtgggagttcaatctccgactgagataaatgctccgcgagggcgcacattgtctggaagacaatggttttgcgccgaccggaacggagtgtagagtgcagtgattctgaaaagaagatgtcagcttgcgctgaccagaatcacgcaccaagtctcacgtgcgttcgacttgaattaatgaaacattgtaaataagacagttcaggcagacagctaaggaaaggatcgtttgtgggggagttattttttggaacacagcttgtaaaattgatgaaggcatcgatttgcagatatgatgttagtacgggagactgtcagacgtttggtgaaaaacaggaagtatatacaacttcggaggaacagaagaaaattttagaaaactgctttcacctgcagcaaaatgaatatccgaaaattcacatgctggaagcggatattctggtggcagagatttcgcatacggatgcaccaaacgtgtggagcctgtttggaccgattcttctggctccgacatcagaaaaacggttcagtcatgcgaacaggaagtatcgtatgctgaaaaaggtcggattgaatctgcaaatgtgtgaattggatacctttgtgacgggaatcctgctgtgctactattttctgaccggaaacgagctgagtgtcgcagaattttgggaacgtaatgaagagtctatgccaaaggtgcagggtgccctggaagagatgacgaagaatctgtttcagtaccaggaaaaagaaagggttggattacacaatccttatgaacaggaacagagggaacaggaagcaatccggcatggagacatcgcggcgttgaatcgaagcatctctgagacctatgaaggacagatcgggcgactggcaaaagatccgctgcgccatcacaaaaatgtggcaattggaaatatcacattggcatccagaacggcggtagaggccggtgtcagtgtggaaaaatctttcaccatggcagataattttatacaacagatagaagaaattgataatgtagtagaagtggaggcgttcaaacgtgaagcccagcggctttatgcatccgcggttgcagaagaacaaaagtcggagacgggcgggtataaaaatccgttgattggagaggtcaaagattatatttttcggcattttcacgatacgatccagattacagacattgcaaaacatctgaatgtgaatccggattatctgtctcatctgtttaaaaaacaggaaaatatcaccattaaacggtatattttaaaggagaagattcgaaggagcaggaatctgctacagtattcggactattccattcaggaaatcagtttttatctgggattcagctcccagagccatttctgtaaggtatttcaggagatgaccggagagacgccgggacgctatcggaagcagtttgtacatcgtacgaagtggaagattgtataaaaataaaataagaaatataaaaaacagctaagataattgatatatcttagctgttttttattttatactggatattaaggtagggagtttttcttatatccccaaagaaaatgaaaactgccaaaacgaggaggaggagagatcacatgaaaaggatgagacaatttgcaagtctgatcgcggcagcagccatggttgtaaccagtgttccgatgaacggctggacagtacaggcacaggcagcgactacgccatctgtagatactacggttaaattgaaaccgacggaagcatctacattcaatgatacgaataaggatggacttggcgaatttcagggatggggcacatccctgtgctggtgggcaaatcgaatcggttacagtgacaaattaacagagcaggcagcaaacctgtttttcagtgcggatggactgaacatgaacatcggccgttacaatgttggtggcggtgatgatgtagcagatactgtgactactacaaaggtaccggtaaatgagaatgcaacattttatgatctgacagcaggaacgtatacttacaat

SEQ ID NO: 13295 - DNA, 27084 bp, Unknown
  gut microbiota DNA sequence
gttctttcaacaaacttggctggatcaataaacttgacgatgctgctggttcaggcgataatctgcgttataacgtaaacgtagaagaagctggtgaatataccgtaaaacttctgctgacactggaaggaacaaacagcagagatgtggcaatccgtgttaatgacgacagcactcaggataaagttatttcttcaagtgacattaatagcagtattattgcagagggtaccaataacggaagccattgtatgctgttttgcgtaacaatttctggcgtacagttaaatgctggtgaaaacaccattaacattgcaggaaagtctgactggacactggattttgtcaagatggcagtcgtaaagacttctgatctggcggaacttccggaagaagatgagtttttacatcagtcacatatcgttcgttccgatggtggcgttccgggttatgcgacagaagttactaaaattgatacaacaaagcatgacattaattattatgctgaaaaatttgatcagtatgatgaagactgtggttatgcatggaactatgactgggaagctgacaaaaatcaggttgcagttttaaaagcagttgcaaaagccagcggaaatgacttcatcgcagaggcattttccaattcaccgccatattttatgacagtcagcggatgctcctcaggaaatacagattcttccaaagataatctgcgtgaagattctgtcaatgcatttgcaaaatatatggcagatgttatggaacactggcaggaagaaggcgtgatcagcttccagagtgtagatccgatgaatgagccttacacaaattactggggcgcaaacagtaataaacaggaaggctgccattttgatcagggagaatctcagtcaagagtgctggtagcattgaacaaggagctgcagagcagagaaagcctgaaaggtgtgatcatcagtggtacagatgagaccagcattgatacacagatttcttcttataataatttaacagatgaagcaaaaggcgttatttccagaattgatacccatacttatggtggatctaaccgctccggattaaaaacaactgcacaaaatgctggaaagaatctgtggatgtctgaggtagacggtgcttatactgcaggtacaaatgcaggtgaaatgaccgctgcgcttggtcttgcacagcgtatgatgacagacgttaacggtctggaatcttctgcatggattctctggaatgccattgatatgcatgcggacagcagcgaaataggtcagtattgggtaagcaagggaagtgcaaatgattatctgagtatggatgctctggaaactgcatggaaatccacaacttccagtggttactggggactggcagctgcagatcatgacaatgaggaaatcgtactgagccagaaatactatgcatacggacagttctccagatacatccgtccgggcgataccatcattggttccgaccaggaaggaaaaacactggcagcttatgacgtagatggcgataaagcaatcatcgttgcaatcaatacatcaagctccgatcagaactgggaatttgatctgtccggtttcgaagaaatgggcagcaaggttaccgcaatccgtacaagcggggatctgaagaccggtgaacattggaaagacgtaactaagagtgataacatcgttgtagacgcagatgagcagtgctttacagcaacgatgaaaggaaattccattactacttatatcgtagaaggcgtgaatggaatcaaagacacttcagatgataatacaacggaaaatccggaagtaagccagattacaattgcaaaagatcaggtaaccggaagtgcaccgtggaataatggtaccacagatgttgcatctaatgttgtagataataattatggtacattctttgatggtgttagcagcggatatgttactttagatctgggtcaggagacacagattggtgccatcgcttatgcaccgcgaacaggttatgcaagccgctgtgttggcgccgtgatttcgggatcaaatgacggagaaaactggacagaactgtataccatttcttccacaccggcagaaaagacagatactatggtatactataccgatttcaagacaacgggagtaccgtcctatcgttacattaaatattccgttgatgcaaatggtaactgtaacctgtcagagttgaaagtatataagctgacagatgcaattgcaaccagtatgacagcacattatgatatgtccgtatcagacggaaaattaacagatgtgtctggaaaaggcaacgatgcaaccttacatgatattgatgagagcagcgtggctacatacggaaaagaaagcgtattacagtttaataaagatggatatgcagacattccggcaggattagttggaacagacggtaaattcactgttcaggcaactttcagtacacagacacaggcaaaccactggctgtggtgcttcggaagaacggttgcttcctggccagacgttgataattatgtatttgttggtgtaaattctgcacaggataattacaaaggaaatacacttgcagcagtcagtgttggtggtgagtcaagaatgccggcaccgtctaccactccgggggcaggttatacatcaattacagttgtatctgatggaaccaatctgtatatgtacatggatggaacattagtatctacccttgaaaaccatggaaaagatattacaaaaacaattccaacagatgatgcccttggatatatcggaaaatctctgtacaacggagatccgttactgaaagcaaacgtagccgatatgaaattctggaatacagcattaacagaagaagctgtacagaaagttcttccgaccacagcagagaagaagaaaatggttctggcagatatccgcaaagctgtattaaacggaaatgcttcagcatcagaagtaacaaaagacatcacattaccaacttccatcgacggatatgatctgacatggactgttccggaaaatgcagcaattacttccaatggaaaagtaacagctcaggatgatgatgtatatgtaagccttaaagtcgcttatggcgatcagactgcaagcattagcctgaaagttccgggtgagaacattgaatccaccatgaacgaagcacttgcaagtgtagatatcccgaacaaagatgatgtacgtggaaatatcacacttccggaaaaaacagaaaatggtgtaacagtcacatgggaaacagatcatccggaaatcgtagatgtagcttcacatgacaatgaggactatgatgcaacaccggcaggtactgttacaagaccggaaaaagatacaactgtcaaaatgacagcaactctttcctataaaggaaaaacagagaaaaaagaaattgagatcaaagtaaaagcagccgcaaaagaaattaaagattctgattataccgattacttctttgcatactttgcaggagaaggctattccgatggcgagcagatttattttgcatccagccaggatggaatgaactgggatgatctgaatgacaacaacccggtacttacttctacactgggtgaaaaaggtgtacgtgatccgttcattatccgttcaccggaaggcgacaaattctatctgatcgcaacagatctgaagatcaatggcggaaacggctgggatgctgcacagaacagcggaagccagagcctgatgatctgggagtctactgatctggtaaactggtctgatcagagaatggtagaagtatctgctaaaattgaggcaggctgtacctgggcaccggaagcaacttacgatgcaaagacaggtgagtatgttgtatattgggcatccagaacaccaaacaaagatacaaaacagcgtctgtactatgcaaagacaagagatttctatacatttacagatccacaggtatatatcgattatgatcagtccagtattgatacaacaatgatcgagaatgatggtacttattacagatttacgaaaaacgagggtggcagcacaaatgagcttggtgcactgacaaaaacaatcttcttagagaagagcgacagtgtattaggtacatttacacagatcaaatctgattccctgaacagcaatcagtatgttgaggggccgaccatcttcaaactgaatcaggatgatacaaatggtactgacaaatggtgtctgctggtagatgattttggtggcagcggatattatccattgatcacaacagatctggaaagtggcgaattcacaaaaccggatgccggtacatacaaaatgccaagtcgtgcaagacatggtacaccgatccgtgtaacagcagaagagtacaatgcaatcatgaaagcatatggtacaccggaaacagtgaatactgtaggaacacttggtgagacacctgaacttccggagactgtaaaatgcggaaacgagcaggtagctgtaacatggagcctggatggtgtaaactttgatgtaaatccgtacagctatgtaactgtaaatggaacaacagaaaacggaaaaacaacaacagcaagcgttcagatgattccggaaaatgtagagtacatgatcgacagcaataatacagaatctgctacatggcagaatgtaaaatctgtaagcaaaaaactgctgaatacagatactgcagatcaggctaagacagaggataacagctggggctacacaagtgttgttggtgactccggagatatcaaaggcttcagtcagtcaagtgtatccaatccatatacaggcggctggtgggcacgcagcggaaagaacattacctatcaggtaacacttccggcaggtgaccatgagatcatgcttggaagtaccggctggtggaatatgaaccgtgagatggatgtatattattccgtaaacggctctgatgaaacaaaactctgtgattttgatgcagtaaagaatgcagagtcctgtgcacagggaacgatttctctggataaagaatcggttgtaacgctgacggtaaaaaaagcagcaaataaggatccgattttaagctggatcagtatttcagatgtaacaaaacgtgatactactgaactgcagaaagcttatgatgaagcaaaaggataccgggaaaataaagcaaattatacagcaggcagctatgcaacatatgagacagcattaaaagaagcagaaagcttacttgagaatccgacaattcagacagaaattgatgcagcagctacaaaactgcaggatgcagtaaaaggtttagtagatatcagtgaattaagaagtctctataatgagaacaaagatatcgcaggcgatgcttatactgcagacagctacaaagtatacacagatacacttgcagcagcagaagcagttcttgccaacgatgatgcaacagaagaagatgtggcagatgctatatccgaactgactaatgccgtaaatggtttggttaagaaacctgttgagccgacaccgggtgagaaacatgcagatggtctttccgatgtaaaagatgcagatggcaactggtattactacaaagacaacaaagtagcaaccgatgtaacaacagtcgcaaagaacaaaaacggctggtactatgtagaaaacggaaaagttgacttcaactataccggatttgcttccaatgaaaatggtgactggtatgtagtagagggaaccgttggatttaatgtaaacgatgtgatcaaagatacaaccggagcattaggcaaaggaaattggtattatgtagtggacagcaaagttacttatactgataccgtagcaaagaatgcaaacggctggtggaagatcacaaacggaaaagttgattttgattacaccggaatagcaaagaaccagaatggctggtggcgcattgttgatggaaaagtagactttaactgcaatagcgtagagaaaaacgaaaacggctggtggtacatccgcggcggtaaagtagatttcagctacacaggaattgcaaaaaatgcaaacggctggtggcgcgttgttgatggaaaagtagactttaactgcaacagcgtagagaagaacgaaaacggctggtggtacatccgcggcggtaaagtagacttcagctacacaggagtagcaaagaatgcaaatggctggtggagaattgaaaacggtaaagtaaacttcaatttcaatggcatggcacagaacagcaatggctggtggtatatccgtggcggaaaagtagatttttcctataatggttatgcaaacatccgtggtgtcagatgcaaaatcgtcaatggaaaagcaatgatttagtgcagaaagaaatatataaaaaaatctaagtaaaataaaaaacagctaagatatttgatatatcctggctgttttttattttatactggtggtaagcggtgaacgtttatgattttcccccagaaagtataaacccaccacaaagaggaggaggagagaacatggagaataacaagcgtaagcgatggcaaaacggtaaagtgctcatggcaggtgttttgtcagctgcaatgatcctgcagccaatgacagttttggcagcagatacgcaagcagatgagactgagaaaaaagtggttccaagtgaagcagagattgcagcaaatgatgacattttgtatgttgcgaactgtggtacggcagatccgacagtgacaccttctgatacgaagttgggactttatcagtctaacgtggatcaggaaaaaggagcagatgctacaactggatatatctggggttatgtaaaagatgacaataacggttatcaggcgtgggcatcatctacagaccaaacggtaagtacatcacaattgcttaattcagcgtggtatatgccatcttcaggatggacatatgatgcagcaaacagtggattcaaatatgattttgaattgccggatcgtgcaaataagagtaccaagtatgaggtaacagtcggccttcgtgttcctgcatggtgggataatcgaagtgttgatattgatctggaagatcaacaggtaggttcacagatttatttaaatggaaagacatccacaggtgctacggtagagaaaacttatgatgtagatgttacagatggagaattaaatgtaaaagtttacaattccaagagaagtagtgctgcggaagatccgatggtcagctatatcattgttaaggcagtaacagatgacgtggatcagttagaagtactgaaattagcagtaaaagaatatcaggataaatatgacaattctgatgtgatttatacagaaaagtcaaagaagacatttgaggatgcacttgcagcagcccagaagttgattgataataatgaaacagatgagactgtgcttgcaaatgcaaaagaagcacttatcgcagcatacgatgcactggtagaagcacatatagagaactatacttcttttaccggtacaaatgcagaccgtatttacgatgacaacggtgtggcagttcaggcgcatggtggtcaggtacagaagatcggtgatacttattactggatcggtgaggacagaaccaatggctacagaccaatgccgggtgtacatatgtattcctccaaagatctgtacaactggaaagacgaaggtgttgttttaaaaacaatggatagttatgaccagtttgaaacagatgattatttcaagagtctgtacggcaatttgactgatgaacagaagaaagatatctacgttgacctctggtccgaaggctgcgttatggagcgtccgaagatgctttataatgaaaagacaggaaaatatgtgatctggttccacgcagatggaacaagtccgtattcttccgatagcagttccaactatgcaaaagcaaaagcaggcattgcaattgcagataatgtaaacggaccatataaactgttgggaagttatatgctggcatctgatccggatcgtacaaatcatggattcgattctgtgggcggacacgttcgtgatatgaacctgttcaaagatgatgacggaaaagcatatgtaatgtattcttctgaaggaaatgcagtaatgtatattgcaagactgaatgatgagtatacaggacttgcaaaagatgcatcagagatgaaactgggagaagatttctgcatcagcagtacagattccagagaaggtcctgccatgtttaagtatcagaataaatattatctgatcacatcaggatgtactggatgggcaccgaatcaggctgcttatgcagttgctgacagcccgttaggaccttggaccagaatgggtgatccgtgtattggagatacttccagtacaacttttgatacacagagtacctgtgtaatcccggtagatgctgagaatggaaaattcatttacatgggagaccgctggtataatccagataatggaaaaaatctgagtgattccagatatgtatggcttccaattgaatttggtgcaaataatacaattgcgcttaagaactatgcaaactggacaaaaaaagaactggataacaaaggagctcttactcttaatacaaaactgccggaaacagcagaaaatctaacacagttaaaagaagtattaccgtcgaccattgatgtaacgattggagataccaatacaccagatgcaaaggtaacctggagcatggatgaaagcgcaggagaccttacacttggttatgtaactgtgacaggtacactgacagatctgagcagaagctttacaattcaggtattctgctgcccgaagaaactggtatattttgcagactgctatacaaatggagataatacatccgatatttttgccaaatttgcagaaaatacagatgatctgttgaataccgtatcagatcaggcatatagcgatgacaaaggtgtaacatggggttatacaagtacaacaggtgcatccggcggaagcagttctgaagatatgggaagcaaaggatctggagatttcttcgacacaggttggtgggcaaccagctctggaaagattgaatatggttttgaactggatccgggaaaatataccgtttctacaggatttaatgaatggtggagcagtaccagaggtattacaatcacagtttcttctgtagacgcagagggcacaaaaactgtcttgaatacaggaagcgcaagcctttcttccagcaagacacaggatagaagcaatattgacgtgacagtaccggaaggttccgatcacattcttgtaacagttacaaaagcttccggttccgatccggtattaagctggattggtatcactcagacagaaagtaatgctgttgagagcacaaatatggttcagaacggaagttttgaaaacggaagtgacaactggagtattggtgaaggaacaactgttgtagaagatgcagaggctccggaaggctcacattatctgaaagataatggaaatacacatagctggggtgacggaagtagccagtctggtattgcggtagaaccggatacagattatattcttaccggaactgcaaaagttagcggaaactcaggttcttattactttgttggtgcacgcgtaaagagcacgagcaacaccgagggtaaagaaaattatgttgtatattcttcagacagtgtattgccagacaaagaagatacagataaaaaattgactgttggtcaggtcgcaaatggaacggactggacatcttttacagttaaatttacaacaccttcagatgctacaacggtagatgcttttacatgggcagataatggtgcgcagggttacttagacaatgtaaaactggtaaaagtagaaagcgcacttgactggacagagtttgatgaaacactggaagcagtagaagcattaaaagaagcagattggacagcagattcctggaatgaattccagaaagttgtagaagaagcaaaagcattcaagcagaatgcaactgatacaacaaaacagcgtgagatccgtgagatgatctacaaagtaaaagcggcacaggaggaattaatctccatcaatgagccgactggtgatgtggcttactatgtagatgcagaaaatggtaatgatgataacgatggaacatctccagagacagcatggaagacattaagaaaagcttcttctatccgcaaacttaccgcaggtggcaaaatcttactgaaagcaggatgcacatggaatggtgagcagttacttgttaaaaatgcagaaggtactgcagaaaatccggttgttatcggaagctatggtgaaggtgcaaaacctgtcatcaacggtaacggtgcaaactggacttatgctacaaaagaagatctggcagccgttcatatcaagaacagccagaatatcgtagtagagaatctggatattacaaactgggatgcatctgcaggtgagattggaacttacaaacagagcagcaagctgttatccggtctggtagtagaaaaccgcgatgcaggagaacttgcaaatgtaacaattcgaaataataagatccatgatgtcaatggtaagatggcaggtggagcagataaaggcgcaggcggactgatcgttctgataacaggcgatggcagcaaccacaccggaaaagtagaatcttactacgcaggattaacgattgacggaaacgaagtttacaatgtttgccacgaggcaatctatatggagagcgtgtgggcaagccgtaaactggttggtggaacatacagtgatacaacctaccagaatgccggcaacagtaaatggatcggaagcagtgatgtagagatcaataataactatgtacatgatgtagctggtgatggtatcgtaccgatcaacacaacagatgcaacggtagagtacaacctgatcgacaactctgcagacagcaactgggattacagtgcaaatccgaaccatgcagcactctggtcatgggatagcaacaatgtaactttccgttacaatgaagcatttaacacatccgaacattctatcggttccgcagtaggaaacgacagtatggcattcgactttgactatggtgtacagaactgtgtatatgagtacaactacagtcatgacaatctgggtggattcctgatgctttgcccgggaccgggagcatctgtaaacaacattgcacgttacaatgtcagcgtaaatgacggtaaatacgatggtgcaccgatgatccgtatgggaactggcaaatatggttctcttggtatccagatttacaacaataccatgtactgggagaacaatggtggttataccatggctctgacaccggattccgcatgggaaggaacaagcatcaaagatgtaactgtatttaacaatattttctatggaccggcaaaagcaaatagcatgagttctaaagtatcttatgcaaacaacctggtatatagtaatgatggaagtgcacagaatgtatacaaagcaaatgcaaatgatgaaaatgcagtttatgcagatccgaaatttgtaaatacagaagattttacaactggaacatgggcagatggcaagacaacacttggaactgtagacggattcaagattcaggaagattccccggcaattgatgctggtagagcacttccggaagcaccatcttacacagatgatacacttggtaaagagcttgttaagaatgaagctgcaattccaaccgtagattactatggaacagcacttagcgatggaaaaatcgatattggtgcaaatgaggtaattacaaaagaaacttctgcaagaaatgaaattgctgcatatatcgaggctcagaatgaagtaatcagcaagctggcaggattaagtgcagatgagatcagcgattaccagagccaggtaagcaatgtcgcagacgaggtagaagtagatctcaagaacgatccggaaggtgcagttgagatcgccaaggcactgattgatgacatcgtagcaaaagcaaaagcagcatctgaagaaaatcagaaaccgatcgagacacatccggatggacttgcagacagcaaggcagcagacggcaactggtactactacaaagataacaagattgctacagacgtaacaaccgttgcgaaaaatgtaaatggttggtattatgtaagagatggaaaagtagatttcaaatataatggatttgcttccaatgagcatggtgactggtatgtagtagacggaaccgttaaatttaacgtaaacgatgtgatcaaagacacaaccggagcattaggcaaaggaaattggtattatgtagtggacagcaaagttacttacacaaataccgtagctaagaatgcaaacggctggtggaagattacaaacggaaaagtagatttcaattacaccggaatagcaaagaaccagaatggctggtggagaattgtagacggtaaagttgatttcaattgcaatagtgtagagaagaacgaaaacggctggtggtacatccgcggcggaaaagtagactttagctacacaggaattgcaaagaatgcaaacggctggtggagaattgtcgatggtaaagttgacttcaactgcaacagtgtagagaagaacaaaaacggctggtggtacatccgcggcggaaaagtagatttcagctacacaggagttgcaaagaatgcaaatggctggtggagaattgaaaacggcaaagtaaacttcaacttcaacggtatcgcattgaacgaaaacggctggtggtatctccgcgatggtaaggtagatttctcttataatggttataccagatataatggaattaactatcatatcgtaaacggaaaagtagttggctagatacagtcatacgaaagtaatatttgacaggagttttatatgttaggaatgaaaaagagaactcctgcaggacatgcggcagtggggataatcctcactgccgcattgctttttgcaggtggatgcgggacaaatacacagaatcagacagcgggatcaacggtgtcggaacagacctctgaattgacatcggagcaggcatcggaacaaggttcaggcaaaatggcgaaatatgtgccaacaaaagcagatgaagtacaaaacccggtgttgtatctggatggagatcctgtttcacaggaagaatatgcgatgctggcgcagcagtataaaaaccagatcatgatgaaatattctacggatcaggtcaaccagccggatttctggacgacagagatcgacggagagacacctgcggatgcgctggcagcaatcgtgcaggacaaattacaggaatactatgccattaaacatctggctgtggtagaacaggtgacggatgattatacctatgcagatctgactgataaaatggagcaggaaaatacttcccgtggggacgattctaataatgatacgacttatggattgaataattttgacatgagtacatattacagctactggtattcaaatctgcagacacagcttaccaatgctctgacagcagatagtgtaaaagcctcagatgccgactgtaagaagtattattcggagcatttgacggattttacatatacggatgacgtacagattttgtatgcagagattacgcagcagaatatggatcaggttgtggaaacggaagccaaggggaaagaactggcagaggcaatgcagaaagctaccaacgaagatgatctgcaaaatatcacttacgcggatgtacaggcactggaactgaattctctcgatacgcaggaaggcatgagtggcgtgtaccggaatcgttgggagatcgcaaaaggattatccgcaggggaagtatacggtccttacgaagataatggaaaaatctgtgttatgaaatgtatcgaaaaagaagccgatggtcagattgcatatgaaaatgtgaaagatcagatcgcacgttatctgcaggtgcagcaagtggatcagatgattcaggacgaaaagaatggcatgcaggtgaccgagggaacgatttccgtgcaggatgccattgtgcaggcgttcaactagaatgaggagatttccggcgatgaaggtatagattcatctcagtctgagttgaatttgaattaccctacaaagaaaggaggtgaacattcctgtatacattataatgtcgtctgaaaacgaaactctcccgttgaggcaaaaaatccataaattccatggtatttttccacaacagagatcatgctctgcacgccgattccatgtccggcgcgatgtgagatcggaatgtcattttcaaacaccggttctttaccatagctgtttgccatgttgatacagagctgatgatttttctcatagatcttcaaccggatataacgggcgtttggatcggtgatctctgcacaggaatggatcgcattttccagtgcatttgccaggagactgcacagatccggaatctgaaatctggaaaaatcagtggcagttacagatacaatggtctgaatatcctgctctgtggctttctccagataagaagataagatcaggttaagagctttgtcctgacagtaccttttcactgggattttatccagatcatcgcagatctctttcatatactgcattgcctgctccagctggttttcccggatacattcctgaaggaaatgaaggtggtggcgcaggtcgtgtcggtagatggaagattttttatctgccagagacagctgcgcaatctctttttgtgcttgagcagcagcggtattcaaaagcagattttcccgttctgcctgattcctctgactggaaaattcaatagtcagaatcgacaggataaaatacaaaagcacaagaaaactgtccataaaatcaatgataaccggaccgccggtgtacatcagatctgtatacacagtaaaagcgtattccagaatgtagtaggacaacggaagcagcaggaacagtgtcagaatggtcttgttttcgtgctttaattttatgatatggggtgccatatattttacgacaaggaacagaagcggcagtgttacaatgatcgttgccgcatcggcaatcaatggatcataatcaaaaaagctggatacaaatgtgcctacccattttcgcggagtacacatcagataggcagacaaaactgccaccatggaaacgtaaatgctttttttcagtccaaaataaataagcaggatcagtggcagatggatcagcagcgggtaccactgatataatcgattctccccaagtaccaggtaaaagattacctgcccgatgccaaaacaaaggtaagacagcagatacgttttgcgatgcttccgaaaagaaatatctgccagacataaggatgcagtaatgccaaaaaacagtacaaacgcgtaattgatgagatttaaggtgtttggcaggtttgtcatggtatttcctccatttgaaaggcgagataatgttttcggatctctgcaactcttcgttgtgccagaggcagaagcgttccgttctgaagctgcatatccgaagtgctgatcaggcggatataattcatatttaccagaaatgaacggtgcgccagaataaattccgggtattgtatcagctggtcacagacgggggaaaaacggtctgtgcaaacaatttcttctccgtttgcaaggtaataaagtactttccttccctgtgcttccacatacataagctgatttaacgggattttatgtacaccgatattgcttttcagaacaagagatctgccctgttcctgatcccgttttttccggatttcatccaatgactgataaaagcggtcaggcacaattggtttcatcagataattggttgctttaaccgtataactttctaccgcgtattcaggagaggtagtaagaaaaataatgtccgcggctttgtcgaagctgcggatttcttttgccagctccataccagtgatttccggcataatgatatctaacagatacagattgtattgcgtttcggaaagagtgtctgccaacttacggctatcgtgaaacgggcagatggtaaatgtcacatgctgctgtgcctgataactgtccagcagtgacaatatatgggatagctcctgtctgtcatcatcacagattgcgattttcatctttaccctccttttgttaatcgtatttagtactatatatttatggtgaatatcccctacagcaagtaaggaataggaatcatctatttgttgcttaagttaattcttgcttaagttaaattatacgcgtagcagggataaaaagctactggctttctctgtcattcatgcacaaaaatacgtcattcgtgtaaaatggggattacagttcgcacgcgtcattcacaaaatgcgttttatctcagtctgagttgagactcccacttctgcaagtgatgagtagtaacaagtatttctcagtgggagttcaatctccgactgagataaatgctccgcgagggcgcacattgtctggaagacaatggttttgcgccgaccggaacggagtgtagagtgcagtgattctgaaaagaagatgtcagcttgcgctgaccagaatcacgcaccaagtctcacgtgcgttcgacttgaaatgtaaacatgcggttcttgatttgcttacgggacttcggtataataagcataaccacgaaaaagtatccgtacgcaaaagactaacagtgttagttgaaaattttgcacatgatgattggtgagaatttagatttttagaaaaatgtacaataaaaccagaagggaaagaaatcagaaaggaactttatggagaacgaaacacagacaccgcacaagcgacgtgtgcgttataaaggaaaatatccaaagaaatttgaggaaaaatacaaagaattacaaccggaaaaatatcaggataccattgagcatgtcatccgaaagggtaatacgcctgcgggcatgcacatttctattatggtaaaagagatactggattttctggagatcaaaccgggacaggttggttttgatgcgactttaggttatggcggtcatacaaaggcgatgatgcagtgccttcagggagaaggtcatatgtacgccacggatgtagatccggaagaatctgcaaagaccagaaaacgtctggcagagcagggatttggtgaggacatgctgaccgtaaaattgcagaatttctgcaccattgatgagatcgcaaaagaagtcggtggttttgactttattctggcagaccttggcgtgtcttccatgcagatcgacaatccaaagcgtggtttttcttacaaggtagacggaccgctggatctgcgtttgaatcaggaaaaaggaatcagtgcggcagaacgtctggataatatttcttttgaagagctggcgggcatgttggatgaaaattccgatgagccgtattgtgaggagatcgcagaggcaatcgtgaaggaaattcgcaggggaaaccgaatcgatacaacgacaaaactgcggcaggtcattgagaaaacattggaatttttgccggaaaaagagcgtaaagatacggtgaaaaagacctgccagagagttttccaggcacttcgcattgacgtaaaccgggaatttgaagtgctgtatgaatttatggaaaaacttccgggagctttaaaaccgggtggacgtgtggcaattctgaccttccattccggggaggaccgtctggtgaagaaagccttaaaggatgggtataagactggtatttatgcggattacgcgaaggatgtcattcgtccgtccgcacaggaatgtgcacagaatggacgtgcccgttccacaaaaatgcgttgggcgatccggtcagatatggaaatttagataaaatgtgaaatgagtagaaaagcagttattttttgctgcattttagaaggagattcatcagaaatttttggaatctcaagtataagattaataggtgtatatattaggtttagtcagtttagaaagaagagaatagcgtgaagaaaaataagtatgagattgatatgtgcaatggcacgatcatggataaactgatctcctttgcacttccattgatgttgtcaggcgtcttgcagctcatgttcaacgcagtggatattattgtagtgggaagattcagcggaagtcaggcgctggcagcggtaggttctacgacagcgctgatcgcagtttttacaaatttatttattggaatttcactgggggcaaatgtactggctgcccgtttctatgcggcaggtcgtgacaaagaaatgtcagaaacggtacatacggcaattatgctggcgctgatcagtggcatcgtgatggcatttgtcggcgtgatctttgcaaaaggggcactggaattgatgggaacaccggatgatgtcatcaatttatccacgttatatatgcggatttatttctgtggaatgccgttttttatgttgtacaactatggtgcagcgattctgcgtgcggtgggagatacgaagcggccgctgatctttttgctgatctccggttgtacgaatgcggcattgaatctgctgcttgtcatcaaatttgatatggacgtggcaggtgtcggcattgcgaccgttatttcacagctgatctcctgtgtactggttttgcggtgtctgcataatacggacagcagctatcgactgtatttttcaaaattgaagatcaaaaaagcatatatgctgcagatttttcaggttggaatcccggcgggaatccagagtactgttattaatctgtcaaatgtattgctgcagtcatccgtaaactcttttggttctacagcgatggcaggttacacggcggcaaacaacctgtttggatttttgtatgtatccgtcaactctgtgacacaggcgtgcatgagttttacaagtcagaattacggtgttggaaaactgaaacgaatggatcgtgtgctgcgtgactgcatcattctgacggtgagtgtgtcactggtgattggtgtcggcgtgtatgtgtttggaccggagattctgcagatttacacgacagatccggatgtgattcagtgtgcgatggagattttgctgtatacaacggtaacgtatttcttctgcggtctgatggatctgttcccgggcgcgctgcgtggcatggggcattctgcggtgccgatgatcctgtctgttattggaacggtaggaacgcgaatcttatggatttacggtattttcccgacacacagatccctgtcaattttatttatttcttatccggcgtcatggattctgacaatcatcatgcaggtgatctgcttctattttgtaagacggcatgtgcatcggacacataaagatacagagagtctggcagaagcatagataaaaatgtaggaaaacggattgtcgaacaggagcaggcaggaaatacaagagcggaatgaagaaaatacttgcctgcattgctgaagataaatatatttctgcttttattagaataattttcttccattttcacataatagcattacaagcaaaatatggcatgtgaagaaagaacatccatgcacacgaatcatggaggaaaaatatgaaagcaacaggaattgtacggcggatcgatgaccttgggcgtatcgttattccgaaagaaatccgaagaaccctgcgtatccgggagggcgacccgttggagatttttacagatcaaaacggggcaatcgtgttgaaaaagtattctccaatcggagatctgagtacgtttgcggggcaatatgcacagggacttgcggcggcatcaggaagtctggtctgcgtgatggatcgggatcatatcattgcggcagctggaaatgggaaaaagaattatgacggaaagccggtcagtcgggaactggaacaatttattgaatcacgggggtgtcaggtgacaggtgcgcaggaaaaagagtgccggaagctgacacttgacgataatatgcagtatcagacgcaggcgctggcaacaatcatctgtgagggagatgccattggtgcggtggcattgtgcagtgcggaaatgccggatcatgtcggagaagtgcaaggaaagctggcgcaggcggcagcggtgtttctggcgaaacaggtggaacagtaaatcttgtctgtctgtgtaaatggaacaagttagaaaaaactccaaggcaaggcggtagactgatttccgttatcggagcgagcatagcccgaccgcgggagtgtgtttgaggcaacagctgtttttgctgttggcaagttcgcggaagcggtcggagataggcggcgcagcgaagataggaaatcggtcgtgcctgcattggagttttttcaaacttgttccttaaacgacaaataagaatttattgacaaattatcggattgtatataaaataatacataagaatgtatacaaaatacgaaaattgtatcttacagcatgaaaaaccgctgaagatttcgttttcgctacagcatagaagagaaacgaggaatgaaaaatggacgagataagtttaaaagcacttgccaagatcaatcttggactggatgttttgggaaaacgggaagatggttatcacgaagtgcgtatggtcatgcagacgatccatctgtatgacagagtagagatcaagaaaacacgatctccgcatattcatgtggaaaccaatctgtattatctgccggtgaatgaggataatttagtataccgtgcagcaaaactgatgaaagatgagtttcagattaaagaaggtgtgcggatcgttcttcagaaattcattccggtggcagcaggtcttgcaggcggaagttcagatgcggcagcagtgctggtaggaatgaatcgtatttttaatctgggcctgaaacagaataaactgatggaacttggtctgaagatcggtgcagatgttccgttttgtattatgcgtggtacagcattggcagagggaatcggtgaaaaactgactgcattgccgccgatgccgaaatgtccggtactgatcgcaaaaccggcgatttctgtatccaccaaagcagtttatgaaggtttgaaattatatgacggcatggagcatccggatattgatggtgtgatggaagggattcagcaaaaagacctcaaaggggttgcttctcatatgggaaatatccttgagaccgtgacgattccaatgtatccggtgattgaggatattaagaaactgatgttggagaatggtgcattaaatgccatgatgagtggaagtggtccgaccgtatttggattatttccgaatgagaaagaaatccgccgggcatacgaagcgttgaaacagtccggactggcaaaaaatgtgtacacatccgatatccataataatagaagataagcggcgaagaagagggggaaataaaaaatgacagacaacttggaattacagatggatgcatatctgccacttcgtgatgtcgtttttcagacattgcgtggtgcaatcctgaaaggtgatctgaaaccgggggagcgtctgatggagttacagcttgcatcgaagcttggcgtaagccgtacaccaatccgtgaggcaatccgtatgttagagcaggaaggacttgctgttaccattccgagaaaaggtgcagaagttgcgaaaatgacagaaaaagacatggaagatgtattacagatccgtctttctctggaagcattggcagtacgcctgtcctgtgaaaatattacaccggcagctttgcaggaactgaaagtggctatggaggattttgaagagaaaacaaaatccggtcagtttgtagagatggcaaaagcagatgtcaaatttcatgagattctttataaagcatccaacaatccgaaactgcagcagcttttgagcaatttgagagagcagatgtatcgttatcgtgtggaatatctgaaagatgcagctatttacccgcgtctgatcgaggagcatcatagaatgtacgatgcactgaaggaaaaggatcagaaacaggcagttgcttatgtggagaagcaccttcataatcaggcagaggcagtgaaaaagatcattcgcgatcaggagtagaagaagtaaaattagaagaatagaacacaaaaaacagcacagactagagagtaggttgatacctgctctcttttttttaggtaaatataagaaagtctctttgcttttcttgtacaaatcaataagttgcgggagacttctctttatcaaaaggagaggtaagcgggggaaatcgatccaaggatggggggaagtacatgcaggagaaaaaggaaaagctgttagaagataaagaagtctccaaagacatagaacagaatattgcctggtggaagcagcttttttcggactgtgcggatatcaaaatgcgggagatgtatctgggaaaacagatggatgtgaaagcatttttaagttatatcgagattacaggtggcaaagatatgctgcaggaatccgcactgggaaaaatgttatcccgattgaaggaaatgtcttcagaagaactgggcagcgctttacagaaaaatgcccttggtatgtcggatgcgacaccgttttctaccttactggatgctgccaatggaatgctgacgggggattcgattctttttgtggatggatttgatcaggcgttgaagattccggacaaaggctatccggggatgtctttgcaggagacagaatcggaaaaagcattgcggggaagcaatgaagggtttggcacatcgatcaagcagaatacggcattgattcgaaaacgcctccggtcggtaaatttgaaagtaactgaatgcaaatgcggaaggcagagcaacacgaatgtcgacattctgtatatggaaaatatcaccagatatgcggtggtggaagaaatgcaggaacgtttgcgtcagtttgaaattgacggtgttcaggacagcggggtgatcgaacagttgacggaaacccagtggttttcgccgtttccacagtttcagacaacccgccgaccggatcgggcggtaatggcactgctggaaggacgggcagtcttattgtcggaccattccccggaagcactgatttttccgacggattataattcttttattaaaacaacagatgattactacacccgttgggagattgccacttttacccgggcattgcgctatgtggcatcggtgttgtctatgattttgccgggattgtatcttgcaatgacaaattttcatacacagctgctgccaaccaaactgttgctttcttttgcagcagcacgtcagggcgttccgtttccgggggtggtggagattcttttgatggagctgtcttttgaacttttgcgggaagcgggggtacgtctgcccggagccatgggaaataccattggaatcgtgggcggactgatcatcgggcaggcagcggtggatgcgaatatcgtcagtcccatggtggtgatcgtagtggcatttacggcgctgtgttcttttgcaattccgaatgaagactttgcgacagcgtttcgtctgctgaaatttgcttttatcggtctggcagcggggcttggattttatggatttttgcttggaattctggtgctgctcattcacctggcgcagctggagagctttggtgttccgtatctgatgccggttgtgggggcagaactcagtggatataaggacgcacaggatacattgatgcgtccacctatgtggttgttgcacagacgtccaatctatgcaaaaagaaataaccgtattcggttacgaatcaaaaagcagggaaaaaatacgaataccgatagggaaaaataagaattgttctttggaaaaaagtcaagttgaaaagcgggaatagaagatttcagaaggatgtagaggaaaacaatgcgggatcgaattattttttcggataatcaacaggtttctgccagacagatcagtcgtgcgctttttctggaaatgcttgggctcagtacgctgttgctgccgccggcactggcgcgtctgtgcgggacagatggtgtatttgccattttatttggcggtgttttgacctatctgttgtctgttgcgtggaatcggtacgatacaaatgtaaaacaaaatgatacaagtgagcaatattacaatacaaaagtattgaaaaatacgaccatggtaatatatataggtgcgtttcttggaatcgccgcctatgtgatgtattttctgaccaccttaattgaagaacaattgttgggaaaatcctatgaagcgacgattgttctgacgttgacaggtgcggcattctggggcttatggaaaggactggagagccggcttcgtgtatatgaggtgcttttttggattttgatactgcccctgggtttcattttgcttgctgcctgcagtggcgtttgcacggattactggacgccggtggtagacacttcctggcagaattttggaaaagggatcttgttatgtgtattgatattttcattgtcgctgctggcatttcgcagcaaaagtcagtgtagcagaccgaagcagcttttacgggcgacaaggcggagtctgtgtgccgttgtgatatggaacgccatcatatatctgattttacttggtgtgtttcaggtgggcttgttaagtcatttgtcttatccgatcattgatctgatggcggtggtcaaattgccgggaaactttctggagcggcaggatgcgctgatgatgggaatctggcttttctgtctgtttgcattgttaaattcaatgctgtattatgcgtcggcacccttggaaaagctgttttctgaaaagggaagaccaaaggcaacgggaatctgctgtctggcaatggcagcgctggcagtatggctgttacattcggcagaacgggcggagcgcatgtttcaggtctatgtatggttcgttgtgccgctgctgctttttctgccggtggtgcaggcaatcgtggaatgtctgaaaaaacgtatcaggcagaaatagaaggagtaaaagggcatgaaaagcgaaaagaggtatctgttttatggaattgggatcatgatgatcatctgctggcttgtttttctgacgggatgtggcgccaatgaactggaaaatcatgcgtttccgctggcacttggcgtggaaaaaacgtcagaggatgatctggaaatctatatggcgtatccggatctgcaggatgacaaggcagcagaaaatgcgctgtcctccgatgtgttctggaatggcaaagggcaggatttgtttaccggcaaggaacagatgtcagcaaatagcaataaaaatgcggatttcaatcacctgaaagtgctgattctggatcaggcaattctggaagatacgaccaggacagaacaattactgcatttttttcaggaggaacaggatgcagcctggaatacgtatgtgatggtgacaaaagaaccgctgaaggatattttttcagaagatctgaagttgccggagtcccttggtatctatctggaagatctgttagaggagtgggaagatgtgcggcagggagcgcaggtgacggtgggaacgctgatgagtcagtattacagcaggaatgaaacgctgtgtgtgccagttctggagatttcggatgcggaagaaaagcctcagatcggtggcttttgtgtgttgttcggattgcagccgatgggagaaatgtcactgcgggaaggagagcagttgatgcttctgcaaaataatttgaaacgttatgcatttacgatgcaggatgggacacgttttttgctggaacaggtacagacagagcgtgagatcacggcggcggtggatgaagcagggaatcaatatccggtgttgacagtaacggttcggggaaatagtaccgtgagtgcattgagttgggatgcagatcaagaagaccaaaggcagcagggaaaacaggaactggcagaccgtctgctgacgtttctgactacgcagcaaaaggaagcgggcatggatctggcgaattcatttctgcttctggcagggcaggagcgcagtttgtgggaacagtatcgtgaggaaccggcgcagtatctttcggatttgaaaatccggctttttgtggaataaatgtttgtggaaaatgtttatggaataaactggaaaaatatggcaagactctgaataaagctcattgagaatataatgtgagttcaagaaaaaaatgtatgattatactgctcagaatcgtgcagaaaattttataagcagttgacttggatgatataagtgatgagcgctattttataaaattatgtatagaaagaacaggggaaagaccatgaaaaaaagatttattgcagtatgtctggcggcagcagcctgcgtattgctttccacaacgatacacacagccatgctgcagcgggatatgtcacagaaagtattgcggtttcatgtgctggcaaacagcgacaatcaggcagatcaggcgttaaaatgtgccgtcagagaccgtgtcggaaccatgatggcagaaaaattgcaaaatgcagattcactggaagaaagtactgatgtggtgacggaaaacctgcaggaaattgaaacctgtgcagcaaatgtgatcagggaaaacggttatgattatccggtacatgcggcgctggaaacctgtgcatttccggaaaaaagttacggtgattatacgttcccatccggaacctatgaagcactgcgggttgtgatcggttccggggaagggcataactggtggtgcgtcatgtacccgaatctctgttttgcaaacagtatgtatgaggtagatgctttctcaggggaaaaattgcgggaagtgctggagccggaggagtatgcagcagttctggaaagcggaaattataaggtgcgttttaaaatgcttggatttctcaatcgcgtgcttgaataatcagggaaaaacgattacaatgtgggatagcacaattttaaccgaatcaagtaagtcccctgcttcaattgcgaaaagcaataagcagtgggtggggacttgctt

SEQ ID NO: 13296 - DNA, 12966 bp, Unknown
  gut microbiota DNA sequence
ggaatttaaacaaaggaagtctgttgtttcctttgcagatagttgtttgaaaataggatctgactgataagtcagaacaggaaatgtgcatgatatgaagatgaggacaaaatatgacaaaagatgtattgattaccatttgcgggattcagaaaagagacggtgagacagatgagccgattgaaaccgtcacaccgggtgaatattatttccgcaacggaaaacattatattctctatgaagaagttcaggagggaattgcggaagtaaccaaatgcatgataaagattggcgatgacagtgtagacctgtcaaaaaaaggtgcatccggggtacatatgatatttcagagagataagaagacacgtacctcttatcagacaccgtatggaagtctgatgcttggatttgattccaaaatgatccgtgtgctggagtcagaggatatgatccatctgaatctggagtatgatctggaagtggaggaagaacatctggcagaatgttccctgactttaaaagttcaggcaaagcagccgagatagtctgattttatcgcaatctccgactgagacaaaagttccgcgaagatgtacggcataaaaaataagaaaaaatacaaacaataagaaagacaacacacagaaatgtgtttaccgatttacaaataaacagaaaaatattcttaataaacaggaaggatagaaaaatggcagaaaatcaggattttagatatgcacccatcggcgtctttgattccggtgtgggtggactgaccgtggcgcgtgagatcatgcgtcagataccaaaggagcgcatcatttattttggcgataccgcccgcgttccctatggaagcaaatcgcaggagacgatcatccgtttttccagacagatcatccgtttccttcagagcaaaggggtaaaggcaatcgtgatcgcctgtaataccgccagtgcgctggcattggagactgtgcagccggaatttgacattccgattcttggcgtggtcaaagcaggtgcaaaggaagctgcaaaagtaacaaaaaatggaaaaatcggtgtgatcgctaccgaaagtaccattgaaagtcagttgtatacaaaagagatccattcccataaaccaaacgctcaggtgttgggcaagccatgtccgttgtttgtgccgttggtggaagaaggatggttaaaagatccggtaacagtagaagtggcaaaccgttatctggagccattgctggaatccggtattgacacactgatcatgggatgtactcattatccattgcttcgctctacgcttcgtcagatcatgggagaaaaagtcaatctggtaaatccggcatatgagactgccagagagctgaaagcattgttggagcgggacggattaaataatgatggcaaacaatcttatgagggtgcgatgcatgagttttatgtcagtgatgcggcaaacaagtttaagaattttgcaaattctattttgccgtatggtgtggataccacacaactgatccacattgaagattattaaaaggcagtgattctgagcagaatatgtcagcttatgttgaccaggatcgtgtaccaagtcccacatacgttcgacttgaatgaatatgtttagaataaaaaaagattgtaagcgcaatacatagcaaaaaatgtgataataaaaaacatcggtgagtggattgatcagaaatccattcaccgatgtttttatttgttatgctgtattccattacaaacttatttctgtccggtaagttttgcgaagaatccgcgtttcttttccggtttttccaaaggtccgcgcacaccgcgaacatctgaaatgaacagaccgctcagagaagcttttacttctttttttactgggatctgatcgtaaatctggttatcagcaatcagagtaacgatctgaggtccaacttttgcttttacaaccggcactttggcaagtcttgcaaaacgcggtgtctggtcgatgacctgctgtggcagtccggactctttcatgcggagttttttcttgtcaatgatcagcatgttgacccactgtgcagcctggtcgatggcagcctgctgttcgtcacgtttcttcatatttcttttgcccatgaaatagagcaggatgattgcgccaacacaagcggcaataacaacaataagtgtaatgatatgtgctgttgtcacagatatatttcctccttcatcggtatttttagtcgatagtaatactaagtctgtatgctattgtatcattgattatatgaaaactcaagaaaaaattaagaagaatgacttttcatttatagggaaatatggtatctttaaaagcagtgatgtcttctgaaaagaatacagaaatggaacagaacgtgttcgtaagaaaggaaactataaaagatgaagaagaaacttgtaatgatactgatggcagtcatggtcgcttctgcaacactgggcggttgtggacagaaaggtgcagaaacaggaactagcgtatctgctgaggaagaagatgtgcagatcagctataaagagctgatgaaagcaacagattataaagtgcagaaatatgtaaaactgaatgactacatgaatatgacggtagaattatcccaggattattctattaccgatgaacagattcaggaatacattgagtacctgctgtccatgtatccggaatatgagaccactgacaagacaaccgtagagaacggtgacatcgtaaatattgattatgtcggaaaagtagacggcgaggagttcaacggcggaagcgcaacaggacagcatctggaaattggttccggatcttttatcgatggattcgaggatggtctgatcggaaaaaatgttggtgatacagtagatctgaacctgacattcccggatagttattctaatactgatctggcaggcaaagatgttgtatttacagtaacaattaacggtattgagacaaagaaagatatcggatacgaagatctgaccgatgaatatgtcagcgaaaactttggaacacagggaatcacaaccgttgatgagctgaaatcccaggtaagtagcggcttggagcagcaggtttactctacaaaaatgcaggaggttcagacagaggttcttgcaaaactcttagatgagtgtgaagttacaattccggatggactgcttgaccagagaatcgcagagtataaagatcgtattaacaagattgtagaggacagtggtaagagctttgaggattacaccggtaagacagaagatgagttttacgaaaatattgatactacaatggaagagagtatcaaacaggagctgatcctggaagcaatcgtaagagatatgaaactttctatttcagaaaagagctttgaatccttcgtagatcagtatgtatccagctacaattttgacagcagagatgcattttatgaggagtacggcggagaggattacatcaaattaagctacgctgagaatcaggcactgtcaaaaattatggacagcgtaaagacaactgtaaaagacacatcttcctctgattcttctaccggtgcagatgacagctccgcagatgcagagtaaaaatctgacagcaggtaatacttttagaaaaaagtggatcgtgaagatctgttttatctcagtcggagtataatctccgactgagataaacgctacgcgagaatgtgcagtgattctgagaagaatatgtcagcttacgctgaccagaatcacgcaccaagtctcacgtgcgttcgacttgaaaaaaacaaaaaagattgatgaaattagctgaggggctaacagttgggaggcaatgattatggaactgacaaacattcgtgacatattcagaaacaaagaagagtatcttgacaaagaagtaaccatcggaggatgggtacgttccgttcgcggatccaaaaaatttggatttatcgtcgtaaatgacggtacattttttgaaccattacagattgtttatggggatcatctggaaaactttgcagagatttccaaattaaacgtgggtgctgccatcatcgtaaccggtaaactggttccgacaccggaagcaaaacagccgtttgaaatccaggcagaaagcgttgaggtcgagggcgcatccgcaccggattatccgctgcagaaaaaacgtcatacgtttgaatatctgagaacaatttctcatttacgtccgcgtaccaatacctttgaggcagtattccgtgtacgttccctgatcgcatacgcaattcacaaattcttccaggagcgtgattttgtgtatgtacacacaccactgatcacaggaagtgactgtgagggtgccggtgagatgttccaggtaacaaccatggatctgaacaatgtgccgaaaaaagacgatggaagcgttgattttacacaggacttctttggaaaaccgaccaacctgaccgtaagtggacagttaaacggtgagacttacgccatggcattcaaaaatatctacacctttggaccgactttccgtgcagaaaattccaataccacccgtcatgcagctgagttctggatgatcgagccggagatcgcatttgcagatctgaaggacgatatggtactggcagagagcatgttaaaatatgtgatccgttatgtattagagcatgcgccggaagaaatggaattcttcaacaagttcgttgacaaaggattacttgaccgtctgaaccatgtattaaattctgattttggtcatgtaacttatacagaagcaatcgagatccttgagaaaaacaatgataaattcgattacaaagtattctggggcgcagatctgcagacagagcatgagcgttatctgacagaggaaatcttcaaacgtccggtattcgtaacggattatccgaaggagattaaagcgttctacatgaaactgaacgaggatggcaaaaccgttgccgctatggactgtctagttccgggcatcggtgagatcatcggcggaagtcagcgtgaggatgactacgacaaactgcttggcagaatgaaagaacttggactgaaagaggaagattatgacttctatctggatctgagaaaatatggttctgcaagacatgcaggtttcggacttggatttgagcgttgcgtgatgtacctgacaggtatgggcaatatccgtgacgtaatcccgttcccaagaacagtaaataactgcgaactgtaatgaaaaatgaaaaaggggaggtttggtgcatgccgacctccctttcttagacaaagaggacatttatggcgaattacaaaatatatattcaatatgatggaacccgctacaaaggatggcagagacagcgcaccacggatcagacgattcagggcaagattgaggcaattttaacaagacggtatgggtgcatcattgaaatcgatggttccggtcggacggatgcaggggtacatgcccgtggacaggtggcaaattttcggattccggaggcgttgtgtgatggaaaggcaccagaagatgtttgtgatgagctgctggcgctttttgcagagtatctgccggaagacattgcagtgacagaggtgcgggtggcatcagaacggttccacagccggttaaacgtcgtgaaaaagacttatgtataccggatctggaacgcggcatatccaaacgtatttgaacggaaatacatgctgcatgatacgcggcacatggatgtggaagctatgcgtcaggcagcagaatatctgcttggaaaacatgactttgcggcattttgcggaaatgcgaagatgaagaaatccacggtgcgaacgattcatgagatttccatagaagaaatcggcggtgagatccgtttcacttataccggaaatggatttttgcaaaatatgatccgcattgtgaccggaacgctggtggatgtgggaaccggagtttatccgccggagcatgtagctgagatcctggagtcaaaagtccgggcagaggcaggtccgacaatgccggcacagggactgaccttgtgggaagtagtatattgatgcacatgaattatggaaaaaacagatccgtgcattttgttgaattacatgaaaagttttacgtacatcatgaaagtgatggaaaaaggagtatacgattgaaagaaaagtgggttgtatcagctaaaggtgctgattttaaagcaatcggtgaacatttcgggattgatccggtgattgcccggatcatgcgaaaccgcggtctgacggatctggatgaaatggagtattacctgcatggggatgaaaaggatttgatcgatccgcatttgctcaaagatgtggatctggcagccgagatcattctgaaaaaagtaaaagaacagaagaaaatccgaattattggagattatgatatagatggcatccagtccacgtacattttatactgtgcgctgaaacggatcggagcagaggcagattatgtcattccacatcggatcagggatggttatggcatgaacgagcatctggtcacacaggcggcagaagccggaatcgacacaattttgacctgtgataacggaatctctgccattgatcagatccatctggcaaaggaacttggcatgacggtggtggtgaccgatcaccatgaggtgccttacatagaagaaaatggcgtgcgccgggaaaaaatcagtgaggcggatgccattgtaaatccgaaacaggaagcgtgtcagtacccgtttaaaaagctttgtggcgcagcggtggcatggaagctggtacaggtattatatgaacaggcagggattccggtgtcagaagcagatcgattcattgaaaatgccggttttgcgacagtaggcgatgtcatggatctgcagggcgagaaccgcgtactggtaaaactgggattaaaaatgttaaatcagacacaaaatatcggtatgaaggcactgatcctgcagagtaatcgaaaactgggtgagattcgttccggtgatatcggattcggactgggaccatgcttaaatgccaccgggcgactggaaaccgcgcgtattgccttaaaactgctgctttgtgagtcagaagcggaagcggcagtgctggcgcaggaagcggtggatctgaataacagccggaagctgttgacggagcaggccgtagaagtggcaaaacagatgatcgcggatggcggatatgaaaacgaccgggtgtttgtcatctttttgccggactgccatgaaagtctggcaggtattgtagccggacgaatccgggaggcataccatcgaccgaccctggtaatcacccgtggggaagaaggcgcgaaaggctccggcagatctatcgagggttattcgatgtttgaagaactgaataaatgtgcggatctgcttagttcgtttggcggacatcccatggcagcgggattttctctgccggaggaaaatattgaggcattccgccgcagattgaatgaagtgtgtaccctgacggaagaagaattacaggcaaaagttgtgatcgatgtgccgatgcctatcggatatatcacattcccactgatcgagcagttaaaattactggaaccattcggaaaaggcaatgataaaccagtgtttgcggatcgaaatctggtgatcgagcggttgaaaatttacggaccaacgggacgtgtggtacaattaacattacacagttcgtccggagcaaaagttcaggcagtatattttggagatccggacaatttacggttacctttggaagaaaaatatggtaaggtagtggcagacgatacgatggcaaatcgttgtgtccacaacgcggcactgcattttacttattatcctgagattgatacttattatgagacaccgcgggtgaaactgaaaataacgggaatttctgcttgatccgtaaatataatgattttgcagaattttttgcaacaggtctgagaaagaaaaagatatcagactggaacggaggttcaatatgagcaaaaaaagaaaggtattacacagaggtttggcgctgatgctggcagtcgtgatgagtcttggcacatgcctgacagcgtttgccagtgagagtaacagtgatacaaaagtaacgatcgcagacggtgagacaccatatatttcctttggtgcggatctgcgggcagatgagaaagcaaaggttctggactattttggactgacagaagcggatctggaaaaatgcaatgtaaatacagtcacaaacgcagaagaacatcagtatctggatgcctatgtgaccaatgatcatatcggaagccgtgcattgtcttctgtagccgttatggatgcgaaaaaaggcagcggtatcaaagtaacaaccaaaaatatcaattactgtaccgcgagcatgtatgaaaatgcgctggcaaccgcaggcgtggaagatgccaatgttgtcgttgtgggaccgtttgatatgtcgggaacagcagcgctgatcggagccatcaaagcatattctgttatgagtggagaacaggtagatactgatgtcattgacggagccgtcaacgagatcgtcgtaaccggtgacattggaaatgagactggaaataccgatgaggtagcgggaatggttgcgtatctgaaagatcaggtgggcggtaaaaatctgtctgattccgagatcaaagatgccattgatgaggcttctgaaaaatttaatgtcagtctgacacaggatcagatcgatcagcttctggaacttctgaaaaagttacagggactggatctggactggggtaacctgaaaaatcaggcacagaacctgtatggaaaattaaaagatatgggactgaatattgatacggcagcgctgacagatcaggcgcagggattttttgcaaagctgatcgcgtttattaagggtctgttccagagataaggatggtgttttgtgccgaccggaacggagtgtagagtgcagtgattctgaaaagaagatgtcagcttgcgctgaccagaatcacgcaccaagtctcacgtgcgttcgacttgaattgtataaaacatgaatttgtatgataaaaatggaagtgacaaacattcagacagaaaattgcgcagtatggaggaaaaatggaagcttatacagagtttgccaatgtatacgaaaaatttatggataacgtgccttacgaaaaatggtgtgaggcgatttgtgagattttacgatcacatgggatagaagacggtctggtgctggatctgggatgcggaaccggaacgatgacacgtctgttgcgagaaaaaggatatgacatgatcggtgtggataattcggcagagatgctggagatcgcacgcgaacatccggatgacggaatcctgtatctacagcaggatatgcgggaatttgaattatatggaaccgtgaaggcagtggtatgtgtctgtgattccatgaattatcttctggaggaggaagaccttgcagaagtattttcactggtgcataattatctggatcaggacggaatctttatttttgatatgaatacgctgtacaaataccgggatctgatcggagatgcgaccatctgtgagaaccgggagcatgaaagttttatctgggaaaattgttttgacgaagaaagcagtatcaacgaatatgcgctgacgctgtttgtcgagcaggaaagtggcttgtatgcccgttatgaggagtttcattatcagagagcttatgagttggaaaaggtagaagaattgatcaaggcatcaggtctggaattactggcagtctgtggcgaaggaaccaaagagccgccaaaggcagattgtgagcgggcatattttgtggcaagaagaccacagccgcatatattttaaaaacataatagaaaaaggaatgaaaaacatggaagattatattgtaagggcaactgcggcagacagttctatccgcgcatttgccatgacttcaaaaggaattgtagaggaagcaagacagcgccatcagacaagtccggtagtgacagcagcacttggaagactgctgaccggcggagctatgatgggtgtcatgatgaaaggggacaaggatctgctgaccgtacagatccagtctggcggtccgatgaaaggaatgaccgttaccgcggattccaaaggacatgtcaaaggttatccggtggtaaatgatgttatgctaccgccaaacaaacagcacaaattagatgtaggcggagcagtcggtgtcggtatgatgcgtgtcatcaaagatatggggttaaaagagccatacgtgggaaccaccgttttacagaccagtgagattgccgaagatttaacatactattttgccacatcggagcaggtaccgtcctctgtgggacttggcgttctgatgaacaaggacaatacggtacgtcaggcaggcggttttatcatccagttaatgccatttacggatgataagatcattgatgcgctggagaaaaaactttccgagatcacttctgttaccaatttactggaagaaggacataccccggagagtatgctggagtacattttaggcgatttcggtgtggaaattacagagaaaatcccggcatctttctactgtaactgttccaaagaccgcgtgaaaaaagcgatcatcagcatcggaaagaaagatttaaaagaaatggtggcagacggcaaaccgatcgaagtaaaatgccatttctgtaataccgcatacacattcagcattgaggaattaaaggagatcttaaaacagtgagacagggatttatcaaagtagcggctttgacaccgaaggtgaaagttgcggatacgacatataaccgggaacagatctgcatgctgatcgatgaagcacaggaaaaaggtgccaaaatactggtatttccggagctgtgcattacaggttatacctgcggagatctgttttatcaggaattacttttaagagaagcaaaaaaagagctgctggcgatcgcaaaatataccgagcgcaaagattgtctggtgtttgtgggacttccactggagcatcagggaaaattgtataacgtggcagcagctatcgcacagggaaaagtacttggactggttccaaagacacacatcccgaattataatgaattttatgagcgcagacattttgtatccggcatgaaacagccggttccggttgcattggacgaggatattatcgtgccgatgggcacacagattttattccagtgccgtcagatgcctgcattaaaaattgcagcagagatctgtgaggatgtctgggcaccaaatccgccgggagtggatcatgcactggcaggagcaaccgttctggtaaacctgtctgccagcgatgagacaacgggcaaagatatttatcgcaagagtcttgtgaccggtcagtccggtcgcctgatctgcggctatatttattgcagcgcgggcgatggagagtccacacaggatgtcgtttattccggtcataacttgatcgcggaaaacggttccctgctggcagaatccagacgtttctgcaatgagagcatttatacagaactggatattgcacgtctgaatgaggagcgtcgccgtatgagtacgttcccggcatccaatgagacttatatcaatattgagttcagcttaaaggaagaacagacggaactgacccgttttgtggatccggcaccgttcgtaccgggcaataaggcagaccgcgaaaaacgttgtgaagaaatttttatgatccaggcaatgggattgaaaaaacgtctggagcacaccaatgctgccacagcagtggttggaatttccggtggactggattctacactggcattgcttgttatggtaaaagcatttgatctgttgaaccgggatcacaaagacattgtggcagtgacaatgcctggatttggaaccacagaccgcacttatgataatgccgtcagtctgatcaagtctctgggagcaactttccgggaagtcagcatcgtagattctgtccgtactcattttcgtgatattggtcaggacgaggctgtgcatgatgtgacttacgaaaacggacaggccagagaacgtacacagattctgatggatattgcaaacaagagtggcggtatggtcattggaaccggagatatgtcagaacttgctcttggttgggcgacttataatggcgatcatatgtctatgtatggtgtcaatgcttctgtaccgaaaacactggtgcgccatctggtgcgctattatgcggatacctgcggagacgagacacttcagaaggtactgtatgatgtactggatactccggtcagcccggaacttcttccaccggaagatggcaagatttcccagaaaacagaagatatcgtgggaccatatgagttacatgatttcttcctgtattatattctgagatttggatgtacaccgaagaaaatttaccgtctggcaaaatatacttttgacggaacctatgatacagagacaattcagaaatggttaaaaactttctatcggagatttttcagccagcagttcaaacgctcttgtctgccggatggaccaaaagtcggaacagttgcagtatccccgcgtggtgatctgcgtatgccgtctgatgcaagtgcaagaatctggatggaagaattagatcatctggatgatgagccaaaacaggcagcaggtggattccttggcggaagctgggaggcatttgcggcacagatgagtcgtcagtagaagtaggataattcagtctgaatatggtttttatatcagatgagagatgacttcccatctctatatgtgatgaggaacaaaattatatcagatgggagatgactcccatctctataggtggtgagaaacaagctagtatcagtggtgggagccaatcccccatctgatatagcctccggca

SEQ ID NO: 13297 - DNA, 697 bp, Unknown
  gut microbiota DNA sequence
acgaatcagcagattttcgtcaagtgttttcaggatcagtttaccggaacgggtaagctcctggatacatagatgaaaatctgttgttttatattgggggagttcttctttcagatagtcgtgggactgcccggagcgcacggcttcacgaaaacggatattatagggaattcgcatgacagaaggttctgccagtcgatatgtgtgacagatacgtcgtatatctgtctgcaaagccggaagataatccagaaaggcataacagacatttgaaaacggaatccagttgtcacagaaatagcggcggaatgctgcgggaatcggtggaagaccgataatgaccagatttgcctgtcggagcaaacgaatggtgcgtgcatcctgacgggattgcagatcgagacattggatgtcgccatatttttgtaaaaatgggatgaaaaaatccagacaaaaatgtggatgggaagccgcaagcggactccagaatgcaacgatatatgattgtttcatgtgattagacatcaaaaagataaagacaaatttattatatatgcgaatttcggaaatgtaaagataaatttaaaatttaggtggctaaacgataggtagtaaatgcgggaattatgactaaacgataggtagtgaatggaaatcgggaaaattttatctctgccgctaacaatcgctgtcagag

SEQ ID NO: 13298 - DNA, 2517 bp, Unknown
  gut microbiota DNA sequence
ccaatttcagttattgctgctgtttatttccataatcactgataaaaaagatacctttgattatagatacagttattggcgatactttttccttaataatcttttgtagaaaaaggaattttcaggatgttatgtcatggtcattagtactattttttcttttatgaatttacgttttactttaacttttacttacgattaaggtgctgtaaccggaacggcgaagttcgtcctgtaataagacggcttcgtctaatgttttgggcttgccaatccagactccgtaatagggttcttcgtagtgaatctgtccgtcaaagccgaggatttgcaggcgttctaactggtaagcggcattgacgtcatatttgaacagtcctgtctgcacgtaataatgttccggaacctgttgtgcggaaagtggaatactttcttcgatgcctgtgacaatggcatccacgatggcatcaaattttttgtcaaaaagctggttatcaatgtcgctgttgataaaaccggtttccacaagaactgccggcatttctgtttttcgcaggacgatgagccccgggacttcctcaacaccaagatttttgaatccgacattttccagctggcgattgatattttctgccagagtgtcaacggtatcgttatgttggtaaatcagtgtctgcacaccgttgtacagattatcctccatgccggagtttcggtgaaatgagataaaataatttccaccggacagatttgcaagctgtgctttttcgtttggtgaattgtatacatctgttgtgcgggtataataaacattgtacccggcttcttttaatttggcaccgactgccagtgtcagtcgaagcacatcatctttttctgcacgtcccatatatgatgcgccgttgtcaaaaccgccgtgtccggcgtctaaaataatatctacctccatagttttcccccttaaataatagaattcccagatcacatccttacagagcacttatcttcgtcttagaggatatttctgctgaaaaaatgttggtacacgccacttatagaagtggaagccttttcacctgagatgaaagggcatgatctgtatgcctgttctgattttgcgttgttacatgtaagtaatatatgtttgctttttcaaaatagtacatgagatgtgagatgattctgtatttatggagctgaataacaaaatgatgttaatggcggaatgcaatcgtttacctgatgtagattttacatatttagtgacaagaatgcggagaagattttcgaaataggagtatcactatttgactcaggtgatgctgtctgactttgtaacgtgttttttgttgacaagaaaacagtttttttgtatactttgatgatagaaagttttgataatcaaactaattggagggatagatgagagcacagattataggaaccggtagttgtctgccggaaaaaatagtaacaaatgattttctttccaccattgtggagacaagcgatgagtggatcagcagcagaaccggtatccgtcagcgtcatattgcaataaatgagacaacggcgtccatgtctacagaagccggaaaaaaagcactggagtcagccggagtgaaagcggaggatctggatctgattatcgtagcaacctgtacaccggatacgctggttccaaatacggcatgtctggtacagagtgagcttggtgctgtcaatgcggttgcttttgacattagcgcagcttgttccggttttgtatttgcattgaatatggtggatgcttacatgcaggcaggaatttataaaacggcacttgtgatcggtgcggagacgttgtcccgtattgtggactggagcgaccgctctacctgtgtattatttgcggatggtgcaggtgcagcagtcgtgcgcgcggcagagcgcggtgtgatcgcgtccacacagggaagcgacggaacccgcggcggtgcgatttatgtcaaaaacagagaaaattataatccgtttgtgacagagcagaaaccaatggattatctgtacatggacggcggtgaagtattcaaatttgcagtaaaaaaagtaccacagtctattttacagacactggaagcagcaaagctgaccaccgaagacattgactggtatttgttccatcaggcaaatgcccgaattacggcaaccattgcaaaacgtctgaaagtaccgaatgagaaaatcccgatgaacgtggacagatgtggaaacacatccgcagccagtgtggcgattcttctggatgaagtcaatcgaaaaggtatgctgaaaaaaggagacaaactgatgcttgcaggctttggctcaggtctgacatggggaaccatggcaatcgaatggagtatttaaaaggctgcttcttggaaaaaaatgtgaaagggttccctttgattttgtctttctggctaataatcgcctgctaagaaaaaatcaaagggaaccctatttacgtgtagatttttacattatgtatat

SEQ ID NO: 13299 - DNA, 55364 bp, Unknown
  gut microbiota DNA sequence
ccactgtgtaaatcagagggcgctggaaattttttctccgaacgcgattgctagcggaggagaaaaaattcccagtgccctcggtatacaatacccgaaataaatacattttttcgaaaccaacgcatacattatggtaaacaggattttacgcgaggtttttatgccagatagaggtttacacgtacaacaaacagaaaatgtggacagaggaaggctgcaagtcaatgtaacatcaacattgggtttgcagcctgttgtaaatgcgcgcgtcagcattgcgtacacaggggaagggcagcggacattagaagaattgcagacggattcctccggtcagacggaagaggtgacattagacacgccgccactggaatattcacaggaaccaaaccagccacagccgttttcagaatatacggtaaccgtacaggcagatggttatcgtccggtggaggtgtcagccgttgatgtctttgcggacgtaacatcgttgcaggaaattcgcatggaaccgctggatatttctcagggagaaggggaggaaaatattgttgttccgccgaatacgctgtggggtgattttccaccgaagattccggaggaggaagtaaaaccggtcaatgaatccggagagattgtattaagccgtgtggtaattccggaatatgtaattgtacatgacggaccaccaacggacacccgggcacaggattattatgtgcattaccgggattatatcaaaaatgtagcttccagtgaaatctattcaacctggccggatgcaacgctacgggcaaacattctggcgatcatgtcttttgccctgaaccgtgtatacacggagtggtacagaggaaaaggctacgattttaccattacatcttctactgcttacgatcagaagtggtcttttggtcgtacgattttcagaaatatttccagaatcgttgacgaaatatttaacaattatctgtcccgcccgaatgtgcagcagccgattttaacacagtattgtgatggtaaaaatgtgacctgcagcgggtggatgactcagtggggatcgcggtatctgggagatcagggttacagtccgattgagattctgcgttattattacggaagcagcatttatatcaattccgcggaggagatagcaggaattccatcttcctggccgggaacggatctgacagttggatcttccggaacaaaagtgcggcagatgcagcagcagcttgcacggatttctcaggcataccctgccattccaaccattaccgcagatggtgttttcggggaacgaacccgggaagcggtggaagcatttcagcggatttttgatttgccggtgtctggagtggtggatttcccaacctggtataagatttctcagatctatgtgggtgtgacgcggatcgcagaattgaattagatttacaagttacttattatatgtattcaggaaataatcatgcttgcatggaagaattctctggatgtgtagcgaagaattaaataagaaaatgccggagagattataattcctctggcatttttctgcgatttcatgtacaatagggcataaacgacagaaaaataacagaaagaggataaataatggaacagaaaaaaaacattatggattacgatactgtttccttagacgatgagagcagtgccgtagtaattattgatcagacaaaattaccgggaacaacagaaatcatcgcattaaagactgcacaggaaatctgggatgccatctatctgcttcaggtacgtggagctccggccatcggcgtagcagcagcttacggtatctatgttctggcaaaaggcattgatacagacaactacgatgagttttacgcagagttcaagaagcagaaagaatatctggattcttcccgtccgacagcagttaacctttcctgggcattaaaccgtatggagcaggttgtattaaacaatgcggacaagtccgtttctgagatcaaacagcttctgaaagaggagtccatcgagattcaggacgaggatatccgcgtatgcaaagccattggtgagtatggtctgacactggtaaaaccgggtgatggtattctgacacactgcaatgcaggaaaacttgcaacaagcaaatatggtacagcaacagctccgatctatctgggacaggagcgtggctacaatttccgcgtatttgcagatgagacaagaccgctgcttcagggcgcacgtctgactgctttcgagcttcagtcttccggcgttgacgtaacactgatctgtgacaatatgtctgcaactgttatgaaaaatggttgggtagacgctattttcgtaggttgtgaccgcgtggcagcaaacggcgataccgcaaataaaattggtacttccgtagttgcagccgttgcaaaacagtacaatgtgccgatgtacattgcagcaccgacatccaccatcgatatgaacacaccgaccggtgatcagattaagatcgagcagagaaaaccggaagaagtgacagagatgtggtacaaagagcgcatggctccggaaggtgtcaaagtgttcaacccggcatttgacgtaacagatcatgagctgatcgcaggtatcgtaacagagttcggtatcgcacgtcctccttacacagaatctttcaaagagatttttgcaaaaaaagaggcagctcagaaaaataaataagtataacaaatcgtatggtataatttcctataatcctagtagaatataggaaataaatgcttcacttttttgaaagagtggggtataataagcagtaatggttcagcagagataagttctcaggaaagaaaattatttttatatcaagcagcatttggttgcaggatataataaatctatgctgaatcattataatgcttattgagaatcacaggaggtataaatatggcagacagtgcatgcagcagctgcagcagtgcaggaagctgttcttccgaaagctgtgaaggatgtccaagcagcaaacagccgcagagctttcaggaaaaattaaatgagtattcatccgtaaaaaaagtaatcggtgttgtcagtggtaaaggtggtgtcggaaaatcattcgtaaccgcatctttggcaactgcaatgcgtaaaaaaggatacgaagtaggtattctggatgcagatatcacaggaccgtccatcccgaaaatgtttggtgtacacggaccggctatgggcagcgagatgggaattttaccgatcgcagcagaggacggaaccaagatcatgtccatcaacttactgatggaagatgaggaagctccggttatctggagaggcccggttatcgcaggaaccgtaaaacagttctggagtgatgttgtatggggcgaccttgattatttatttgtagacatgccgccaggaaccggtgacgttccgctgactgttttccagtctcttccggtggatggtatcgtgatcgtgacatctccgcaggaactggtacagatgatcgtaaagaaagcctacaatatggcaggtatgatgaacattccggtacttggagtcgtagaaaattacagctatctgaaatgtccggattgtggaaaagagattaaactgttcggtgagagtcatattgatgaggtagcttctgagctggcaatgcaggttcttggcaaaatgccgttggatccggcttatgcagaactggcagatcagggattattctacaaagcagataatccatatctggaagatgcagtgaagaaaattgaaaatatgtaaatgataaaatgtaaaacggagtcggcatattgtcggctccgtttttttccttttataagaaagttcaggctttcttacatcgacagaaacttgggaatgtctgtcatttactatattaggactggataaagttggacctctgtcctgctggacagaaattggttcggacaagtttttgtacttattccggttattatattacaataaaaactgagtggtgggagccaatcccccatctgatatagcctccggcaggattacagaggtgcgcagttgaagtatgtcatgcaattgcatgacgcgcacctcgcaacaagaatgccggagcattcttgaatctcataattgcaatattacaatgttgatttttacacgataaagatattgttgctttatcgtgttttattttgccggataaaatccgcttggtgcatcatttaagttgatcatgatgttctttgtctggctgtaagcatccagaattgccttgtcgttttcacgaccgataccggactgtttgtaaccgccgaacggtgcgccttccggaatctggttgtatgtattgacccacatacgtcctgtctcaatacttcttgcgacacggagcgcacgatggatatctttggtccatacagcaccgccaagtccataagtagactggtttgccagagcaatgacttcgtcctctgttttaaatttgatcacaacagcaaccggtccaaagatttcttcctgagccacacgcatatcgttggtaacgtttgtgatcagtgtcggctgaacgaaacttcccttttcacagccgttttctgtataatagtcaccgccgcatgcgatggttgcgccttcttctttggcaatctgtacgtaggagaggattttgtctgcctgatgtctgttgatctgagcacccatctgagtttccggatttaacggatcaccaacgttgatatgctggaatgcatttaccagttctgcaacgaatttgtcataaatatcttcctgaacgaatactctggagccagcacagcaaacctgtccctgattaaacaggataccaagctgtacgccgtcgatggcagcttcccagttgcagtcgttgaaaataatatttgcgctcttgccgccaagttccagagtagccggaatcagtttgttggcagcagccagagcaacgtttttaccaatctctgtagaacctgtgaaagcaagtttacacagatccgggtgatctaacagatactgtccggattttccacctgcaccggtgatcaggtttaatacgcctgccggaagcagatcctggatcagttcggtaaataccagcatgctgagggatgttgtggatgacggtttgaatacgatacagtcaccagcagcgatagccggagcaagtttccatgccgccatcaagaatgggaagttccatggaacaatctgtccgacaacaccgatcggctcacgaagaaccagactcatcataccgccgtccagaatagaagcaacaccttcgtctgtacggatcagacttgcataataccggaagtggcggatagaataaggaacatcgatcgccattgtctcacggatcggttttccgttatccatggtctcaacctttgccagccattcctgattttcttctacgcggtcagcaatcttatcaaggattgcggcacgttcttcttttgttgtctttttccattccggaaatgctttccatgctgctgcgacagctgcatcgacatcttctttggtagcctgtgcgcattgtgtaaggacttcaccgtttgccggattggtactctggtaggttgttccgtcagatgccggacgccattctccgccgataaataacccatagttttcttttaactgattgttacaactcataatagatacctccttatttgtgatgcgctttacttttgcttgatgttatattacaatagaatctgatatcttacaataaccagaaaaatgtttttataggagaccagaatcgtgttagtgtatgatttgacaaacaggggaaaaaaatcgaaatatgaatatctgtatcaatgtctgaaagaagatattttgagtggaaaactggcagaaggggagaaaatgccctcaaaacgccggctttctgaggcaaacggcatcagtattcgaacggttatgaatgcttatgaacagcttttgatggagggatatttggaatccagagagcggagtggctattatgtggtatctgattttgattcaccattaagataccagaaggtagagataaaagaagcctctccggaacaggatgaaaactggatggtagattttacggcaaacaccacagtatatgagaagttcccgttttccatgtggacaaaagtcatgcgtcaggtgcttggagactacaatctgcatttgatgaagcggggagaatttcttggaagtccggagctgcgttatgaaattgcaaaatatttgtatcacaacagaggtatggtggtgtcaccggactgcattgtcatcggaaccggaatcgaatacttgtattcaaaactgatcggtctgcttccggcaaatgcagtgtatgcggtggaaaaccccggttatcgaaaaatccgtctgatttatgaagacctgggggtaaaatggacctggacttccatgagcaaagatggaattcatatgggaagtttgcgaaaaagcggtgcaacggtggtacatacttccccggagcatcattatccgcttggaactgtcatgactgccagacggcgacaggaattgttgaagtggctggaggaatccgcggaccactatattatagaagatgattatgactgtgaatttcgatacagcggacatgcgatcccggcgttgtatggtctggatgcaagccagcgcgttatttatatgaataccttcagcaaaacactgagcccaggaatccggatcagttacatggtattgccaccaaaattgctggagcagtacgtcaattccgcgaactttttttcaaatacatcttctaatttagagcagcatacactggcagcgtttctgcgggacggatattttgaccggcatttaaatcgtatgcggcgctattatctgagtcagggagaaaaattgaaaaatgcgatccagatgacaccgaccattccggcagaagaaattttgggtatggagaccggtacacatatcttggtaaaattaaaaacgaagctttccgataaagaaatcaagctgcgggcaaggatgaaagggattaatctgtgctgtctttctgaattttgtatcggggagaaagaattgtaccggcatgtgctggtgttgaattattccggactggaagagagccatatgctggaagtggctggggtgctgggcgaaatctttgtttagggtggcttaaaaatttactatttaggtttttataggaactcctgcgattttatctcagtcgctggcaatcgctccttgagaaaaagtcacaggagttctcaagttacattgtggatattgtaaattttttagtggaaatgatacaattaaagtataaatgacaaaaagtataaaaatataattttgccagttataactgataaaattcgaaaaaacgattgtttatctcagtcgagaagactcccacctctgcaagtggtgagtaataacaagtctttctcagtgggagtacaatctccgactgagataaacgctccgcggggatatgatgtcaccgtggggaaaatgggggataaagaagtagattttgcttgtagcagacaaagtgaaaagttgtatgttcaggttacttatctgctagccacagaagaaacaattcagcgtgaatttggtgtgtatgataatatacgggataattttccgaagtatgtagtatctttggacgaattagatctgagtcgtaacgggatcaagcattataatatacgtgattttttgttacttaattcgtggaattaaattttatgatcaaacacaacgtaaatgcgcccaaaatttatttttccttgatgagcaattgttagccagcaaggtaaaataaattttgggcgctttcattaccgaaaattttaagccatcccaagcaagatctactgtgttactaccggctgctgatccgttgccggctgtgtctgtgcctgatctgctccctgatcggtactctgggtagccgcatcggattgttgatttgcatccgttgcatttgcatcagcggaatttggatctgcctgttgctgaccatctgtcggctgcgcagcatctgttgcagtaccgtctgttgcagcatctgtcgtattttcttcatcagaagcaatatattctgtaatatttgcatgggagagtgttttattctctgtcagataaatagcggcactgagtactgtcttggaagtcggaatttccactttctgcgtatcagcttcaccatgtgttgtgtaaacggtaattgcctgatagttatcggaaatcttatacaaaatatcagattttgcaagttcattttcagaagaatccgtgatcacacaacgaagttctttgttgcccggaagtgtgcatgcttccagatttccgttttcatctgtcgtcccctggaataactggtcattaccgtcataaacagtgactgtggcgccggcaagtctggaaccgtctgcattgtaccaacgggtatggagctgtacatttccatctgtcaggatttcctgctctgcggaaagctctgcaccggtgcttatttttgtttcttcgcccggaagtgcaagactgcatccgtttaatacaaaagcactgctaagtgtcagtgcggcgatcagtgcgatatattttttctttttcatttgataattcctcttttcctttcctgaaattcttattgtaatctctaccctatagaatgatacaaaaatgtgaacatttcaagaaatttttatgaaaaaatgaaaaatgttgcgttcggttgacatttgagaaacccgtccttataataagggggattgatgaaaaaaatagtaatcaacagtggaggatctatgaaaattaagaaaataaacatgaaaaaagcggcagtttcctgcgcagcaatctgtcttgcaggtgcattatgctggaatggaagcagtatcacagcatgggcagcgccgacatccggaactgctattaatgacaatacaagggtcagaagtgctatcggtggcagcccgatcggttccctgaaagcaaatcaggaggtaaccatcaaaggagagcagacttctggtgatggttatacctggtatgaaatcacctttgactggaatggagcagagactgacggatgggtgcgaagtgatatgatctcatccggaaacggaacagcagcaaaagatgacacatcagatcaggcagattcctctgatacatcagatcaaaatacagaagcacaggacggaacattccagatttctggaaaaacttatgaaatcgcagataaatttccgacagctgagattccgacagggtttgaggcaacgactattacctacgcaggtgaagacgtttccgcagcaaaaatggaacagggcgatgtgaccttactttatttgcagaacacagaagatagcagtgagaaacatatatttgtatatgatacggaacgtgatgaggcggtgccgtttgtaagcattgatgtgcaggattcctttgttgtagtgacaaatgtgccggaagatgtgacagcagagatttctgattattatcaggagacagaatgtgcattttcagaaggaagcatcatggcatatcagggaaaaacggacggagatctgacagattcagatgcgtcaatttctgatttttactatgtatatggtacaaacagtcggggagaaagtggctggtatacatatgattccgcagatcagacaattcagagaagcattgccaatatgcagtatcaggagaatgctgacaatgcagaagcaacggatcaggcagacaataattctgtgtttgaactggacagcatgacaagaatgctgacagcaggacttggcattgtggcattactgctgctgatcctgtttattgttacatccgttcgttatcatcgtctgcggaaatatctggatacagaagaattcccggaggatgaagatgagacagaggacgatgatctgtttgatgatgatacgaccattggtgtagatatcgttggaagcaccgtggatattgttgattttgatggggatgcagatcattctgttaagaatgagaaaaaggcaaagaaagcggagaaggagaaaaaagctgaggcagcggtgaaagaagcatctgccccggaagctccagtagaggaagttccggaaaaaccggcaaaagatgtatcagcgaaagaactttttgcagaggacgatgatccatcggagaaagtagtcagtgaggagacagaaaaactggttgcggatctgaaaaaaatgattcaggaagtggagaccacgatgagacctgatgatgaagaagatgagttctacgatgaggaagatccggaagaaccggaacagacagagaagaaaaagaaaggttccaaatccggtaaaggcggttcctgggatgatattgaatttttataattttataagttaaaaggaagtttgaaaactgtgaggcgtatcgtaagtatgatcgcttcacagttttttatttgataggaaattacaaggatttcctatcaaataaaagcacttcgtgcagacgatgcacactcacacgagaagaaatcattgcttcgcaatcgtgttcggcgcgggcaagaaagatgtgctattaataatgttattcgcgtaagtgggtgatggcacactttcttgttatgtacagcgattctaagaagaaactattaaaaaacggttcagaatcgcgcaccaagtcccggaaacatgtgacttgataaaagcctaaccttagaatccacggagtgttacaggatagaaaggactggaaaataagatgaaacgtacattgagagtttacaaaaagaccgtcagtatcgtaaatgagacagcaatcggcatgtatcagaacctggtgggagacaaagtaggattcctgttggaaagttacgacaagaattatgaccgttatacgtttatgggagtggagccggaggagctgatttcttctgtgggacaatctctggtgatcacgaaagccgatggcagcagagaagtgcgaaacggaaatccgctggatctgttaaaagaatattacagcgaatttgagataaaaaatgatcatgcggaactgaatttctccggtggactggttggtcagcttggttacgattttattcgctacagcgaagtcttaccagacaacaatccggacgaaattggcatcgaaaccattcagatgatgctgatgacaaagtttctgatgatcgatcatgtggcagagaccatgactgccgtgattctggaagccgatgatgcagacggaaaggcacgggcattaaaagaagcggatgtgatgattcaggaagccagaaaaaacagaggacaggccagtgaatttcagttccatcgggacggaaaaatcattcatcagtccgacagcttggaagaatacagcgaaaaggtagaaaaaatcaaacattacattcgtgaaggacatattttccagacggtcttatcccagagatggacactggaaacaaaacagaccggttttgatctgtaccgggaactgagagaattaaatccatccccgtatctgtattatttcaatttcggaacgtttgaagtcatcggaagttctccagaaatgatcgtaaaacagcagggtaaacgcgtttacacctgtccgatcgccggaacaagaccgagaggaaaaaatgaagaagaagacaaacgtctgacagaagaacttctggcagatgaaaaagaaaaagcagaacatgtcatgctggtggatctggcgcgaaacgatatgggacgggtcagcgagtttggaagtgtaaaagtaaccgatttcatgaaaatccaatattattcccacgttatgcacatcgtatctctggtagagggacgaaaaaaaggaaaatatcatccatttgatctggtatcatccttccttccggcaggaaccttaagcggagcaccgaagatccgtgccatggagatcattgatgaactggaaacggtacgcagaggcctgtatggtggagcaaccggatatgtggacttctctggagacatggatttttgtatcacgatccgaacgatgatcaaaaaaggcgaaaaagtttacctgcaggcgggagccggaattgtagcagattccgttccggaaaaagaatatcaggagtgttgcaacaaagcaatggcactggcaaaaacactggtagcggaggaagcattatgatgttactgattgataattacgattcatttacctacaacttatatcaatatatgggaatcttccgggaggatattgaggtggtgcgaaacgacaagatcaccatcgaggagatccgccagatggcaccggaaaaaatcgtgctttctccgggaccgaaaagcccgaaagaagccggtatttgtctggatgtggtaaaagagttttacgataaaatcccgattcttggtatctgcctgggacatcagaccatcggcgaagcacttggaggaactgttacttacgcaaaagagctgtatcatggaaaacagtcactgatccatcacaccggaaccggaattttcgatggcatcgaatcaccaattcgggtagccagatatcattccctggcggtatccgcagagaatttaccggattgtctggacgtgttggcaaccactgaggatggcgagatcatggcgatgcagcataagaaatatccggtgatcggattacagtttcatccggaatcggtgtacaccgaacacggaaaacgcatgatggaaaacttcttatctctataaaataaaagctcataaaaataaagcaatttttggatgataaaataaagtgatttttaattgatttgaaaatacgaaacgtatgattgaaagataaaaataaataacacaaatagatgacgtaaaaagtgaatgacacaaattgtttatctcagtcgagaagactcccacttctgcaagtggtgagtaataacaagtctttctcagtgggagtacaatctccgactgagataaacgctccgcggggatgtgcagtgattctgagaagaatatgtcagctttcgctgaccagaatcacgcaccaagtctcacgtgcgttcgacttgaatgagaggaaaaaatatgatattagataaaatcgtggaagacaaaaaagtacgtctggtggagcacaaatcccgtatttcaccggcggagatgcgaaagctggcagaagcctgcgaggcgcatccggcaagtttttacgaagggcttgcaaaaccgggaatttccattatcggagaattcaaaaaagcttctccaagccttggaaacatcaccagtcagatcgacctgacaaagcgaattgatgaatacaatgcatcggtagattgcatttcctgcctgacagaagaagatcattttcttggaaatgtgcattatctgaaagaaatccgggagatttcaccacttccgattttacggaaagacttcatgatcgatgaatatcagttttatgaggcaaaagtgatcggagcaaatgcaatccttctgatcaccggaattttagatgatgttcagatgcgtgatttttatcagttgactacagaactgggactggatgcattgtttgaagctcacactgaggagcagatggatcgggcactgaactgtggagcaaaaatcgtaggtgtcaacaatcgtgatctcagagatttttcaattaaactggacaccacaaaacgcctgagcaagctggttccggatgaacgcatttttgtgacagagagcggaattgtatcagatgaagacgtaaaattcctgaaagaatgccgcgtggatgccttcctgatcggacgggcatttatggaatctgccaatccgcaggaactggcaaaacactggaaagcactgtaaggaacagaagaaatgaaaatgattgtttgaggataaagagtgagtcattcgtataagtatgatttctatattcttcttgaaaaaagtacaagaagtattcttcaaaaaataatttgtgcaggtgtgaaagacatgacaaaagtaaagatatgcggtctgagcagaccggaggacatcgaagcagtcaatacatatggcgctgattatgcaggatttgtcttttttgaaaaaagcaaacgaaatatcagctatgaaaaagcagagatgttattaaaagaattgaaaaaaaatccgaatatccagtctgttgcggtgtgtgtcagcccatcaaaggatgaagtgaaacggatgcagaatctgggatttgatctgatccagattcatggaaccatcccagcagactgccagtcagacggcggtctggcactgtggcaggcggtaaatatcgcaggaggtacagaggtagatgcagatgagctgtttatacagtcaccgaacatccaaggttatgtggtagacggagcggaatatggatccggtaaaactttcggatgggaagcagaagaaaaaacatttgtatttccggaaaaattgaaaatacagaaccggcagtttattttagcaggcggtctgaatatagaaaacgtgcaaaccggaatccatatgctgcacccggacgtggtagatgtcagcagtggtgtggaacgggacggagtcaaagatgcagctttgattcggaaatttatctcagccgcaaagcactgctaagaagccgcaaggtataatgagtgtaaacgagttagcatgctgatatgattggcaagtgacgagtgttgattatgagctattttagctcatgatataacttataaaaattcgattcgaaaaatacaaagtaacatttgatagaggcagaaaggtaaaaaacatgaacaagaaaaatacatattatggagaatttggtggacagtacgtgtccgagtcattaatgaatacattagaggaactggatgaggcttttgaggcagccatcaaagatccggagtttatcgatcagtataactattatctgaaacagtatgtcggacgtgagacaccattatattatgcagaacgtctcagcaaaaaatacggtacaaaaatctatctgaaacgtgaagatttaaatcataccggtgcccacaagatcaacaacgttatcggtcagatccttctggcaaaacgtatgggtaaaaagaaagtcatcgcagagaccggagcaggtcagcatggcgtggcaacagcaactggcgcagcactgtttgacatggaatgcaccgtttacatgggaaaagaagatattgagcgtcaggcattgaacgtaatgcgtatggaaatgcttggtgcaaaagttgtcagcgtagagtcaggcagcaacaccttaaaagacgccacaaacgaagcgattcgtacatgggcaaaaacagcagaagataccttctatgttatcggttctgccgtaggtccgtatccgtatccgaagatggtcaaagagttccagcgcgtcatcagtaaagaagcaaaagcgcagcattacgaagcagaaggaaaacttcctgacgtggttgtggcctgcgtgggcggcggttccaactccatcggaatgtttgcagaatttattgacgaaaaagatgtacagctgattggtgtggaagcagccggacttggtgtagagactggaaaacatgcggcagctatggcacttggcgagcctggaaccctgcacggcatgcgttcctatctgcttcaggatgaggatggaaacattcagctggcacattctatttctgccggactggattacccgggcgttggaccggagcatgcatatctgcgtgacagcggcagagcacagtacgtatccatcacagatacagaggcaatggatgcgctgatggagctttgtgaattagaaggaatcattccagccatcgagagtgcacacgcaatggcttatgctttcaaaaaagcgaaagaaatgacaccggagcagtccatgatcgtgtgtctgtccggacgtggtgacaaagatgttaatactattgcaaactatctggcaggaaaaggttatctgaattaatgaatcattgaccagatagatgaagaaataaaaaaactatttaaaacaaacagcatgaattagtaaattaagcaattatggaaaattaaatttggagtagaagactatgaaccgtatagagaaaaaattacagacattacaggaaaaaaacgaaaaagcatttattacatatattactgcaggacttccggatatggagcattgtgcaaaactgatccgtgcacaggaagaagcaggactggatattctggaacttggtattccgttttctgatccggcagcagatggtccggttattcaggatgcgtcctaccgttctattttaaaaggaaccaacctgcgcaagtgttttgaactggtagacggtgtccgcaaagacggatgcgagctgccgatcgtatttatgatgtattacaataccgtgcttcattatggattagaagcatttgcagaaaaatgcgcagaggttggcgtagacggactgatcattccggatcttccgctggaagagcagcaaccgttaaaagatgcactggcaaaacagaatgcaaccatcctgatccagttggtagcgccggtatctgacaaacgtatcccggagattttgaaagatgcaagaggatttgtatattgtgtatcctccatgggtgtcaccggtcagggtgcaaacttccataaagaagtaatttcttatctgaaatctgtaaaagagcaggcacagattccaatcatgatgggatttggtattcgcaccgcggcagatgtagagccgatgaaagacattattgatggagcaattgttggttcccatttcatcaatctgatggaagaaaatcagtatgatctggatgtggcaaaagaatacattcagacttttaagtcagagctgaagtaaatgagataaagtagaaaaatattttaagatcataaattctgcatatgtacgaatttagaaagaggaatagaggaaaaacagctttttatatgtgcaagaacagatttatgagcagttggttgtaaaaaaggagaattagtatcatggatatgaagcaggcaattcagagagtagcagacagacaggatctgacccgtgcagaggcagaagaagtaatggagcttcttctgactggcgcagccacacaggcgcagatcggagcatttttgaccggactgcgtatgaaaggtgagaccattgatgagatcgttggtctggcatctgtgctggcagataaagcagagcacattcatccacattctgacaattttatcgatctggtaggaaccggcggagactgcacctattccttcaatatttctacgacatctgctattgtaacggcagcagctggagtgccagtggcaaaacacggcaatcgatccatttcaagtaagagtggagcgggtgacgtattagagcagcttggtgtaaatattatgatggagccggaaaaagtagaggcttgtgtggatgatgtcggtattggatttatgtttgcgcagacttttaataaatccatgcggtttgtaggacaggcgcgaagcgagatgggcgtccgtaccgtgtttaacattcttggtcctctggcaaacccatctggagcaaaaggtgtggtagtcggtgtgtatgatccggctctgacggaaactattgcaaatgttatgggacagcttggtgtaaaacgtgcattggtagtcagcggcagagatcatatggatgaaattacattgagcacaaagacggttgtatcagaattaaaagatggagctgtaaaaacatatgaaattgcaccggaagattttggatttaagaccgtagatctggcagaactgcagggtggaactgctgcagaaaatgcagagattacacgcgcgatcctttctggaaaagagcagggagcaaaacgtgagatcgtgctgctgaatacaggagcagctctttacattggcggaaaagcagacagtattgcagatggaatcattctggcaaaagaagcgattgattctggaaaagcagcagaagtgcttggaaatctggtaaattatacaaaataagcaataagatggataaatccttaccggttataggaatattaactataaatatattcataagaacttataaaataaaaagaacaactggtatgacggcaccaattgttctttattaattcgtatttattcgcacttgttacgcaatgctgttcactaattttgctaaacgagcaacttttctggaagcattgtttttgtgataaacacctttggattcagccttgctgataacggaagtagcggatactaatgctgcagtagctgcttctttatcgtttgctgcaacagctgcctctacttttttaatagctgttttcactgaagaacggatagatttatttctttctgtctttgtctgcgcaactaagattcttttctttgctgatttaatgttagccaatctgtacacctcccatgctgagaattcttaaatgattgttacattaaagccggacacggacgaactaatgtaaacatactcatgtattataaggtcggaaattggaattgtcaatagaaaaaccgaaaaaaatgaaaaaattggtataattgtttgtattttttgaaatactaggattatttagaaaagttggggtattttttgtatgtttgaagtcagaacagaccttgcggtagaggaaaatgaacggattacaaaggcgcaggaagaggcaaaagggatcactgttacagaagaagattttgaagaggagcagattcacattacaaccgtgcggattacgacggagaatggggcaaagcagatgggaaaaccgaaaggaacctatattacattagaagcggcggaaatgatcgaggatgatgaggattaccacagagaaatttcaaagcggttggcagaaattctgaaagaactgattccggtggaagatagtggaaaaagaggtgtacagaggggagttggatcacaaagtcgagaggattcagaaaatatagaaagaaagagcagtacacattttgctgaagtcaatcaaaatattgataaaaaagaagaaatcggcacatcaattctggtggcaggactaggtaaccgtctggtaacaccggatgcattaggtccacaggtggcagacaatctgtatattacccggcacattataaaagaatttggtagacgggcctatgaaaatgaacaggtgcagcctatcagtgccattgtacctggcgttatggcgcagaccggtatggaaagtcaggagatcatagccggaattatccatgaagtacagccggattatctgattgtggtggatgcactggcagcgcgaagcgttcgccgtttagggcgcacgatccagatcacagatacgggaatttatcccggctccggtgttggcaatcatcgctatagcattacaaaagaaacaacgggaattccggtgattgccatcggtattccgacggtagtggaagcagcaacgattgtttatgattccatgtcaacattaattgatgaactggcacatgcggaaagtctgcagccgttaaaaagatcctgggggaaattgacggaagcagagcatcggaatctgatccgggaactgttatctccgcagttaaatcatatgtttgtgacaccaaaggacattgatgcggagatcaagcgtatgagttatacgatttccgaagcaatcaatcaggcattttgcggctaaaaacatgtcataagaacaggatttcttcatatacttatatacggggaaaaggaatgtgacatgttgaaaataacgaaaaaaagaaggcgaaaagaaagaagaaaacgtatgatcacagcaggtgtactgttgattggcagcagtctgtttctgtggatctgtatattaggagtccgtaataccagtctgtggaatcgtctgcaatatcagatctgttatctgatgctgaagcagtatgcgccggtgctgaccgcaggagatggggatcagactgcttatcagatagaagacgatacgacgatgtatgatatgcagtcagaaagtcagctgtcttatgatcagattttggtaaaaaaagatccacaggagacacagacggtggatgcttctgctggaaatagtgataccgatgcaaatcaaacagatcctgagaatacacaatcaaatgaagctgatgcatcatcgggtgacgtggctacgacagctgtgtcggcaggtggaaatgcagtatctctggaaaaattaaatgattttgattatctgattcaacattattataccgtggataagtccaccacgattaatagctctcaacttgtggtgcaaaatctgctaaataaagattgtacgattcagaaaacaacagaagatgtgccgcagattctgatctatcatacccacggctccgaaggttatgcggattccacaccgggagatccaaatacttccgtgattgctgtgggaaaccgactgacgcagcttttgcaggatacatatggctatcacgttttacatgatacaggaatttatgacacggatcgggatcatgcctacaatgtggcagcacctgtgatccagaaaattttacaggatcatccgtccattgaagtggtgatcgatctgcatcgtgacggtgtggcagataccacgcgtctggcagcaaatatcaatggcgtggatatggcgcaggtgatgttttttaacggattgagtaaaacaaccgctactggagatattgattatctgcgcaacccttatatcgaagataatctggcaatgtctctgaaaatgcagcttgccgccacagaactgtatccgggttttacaaggaaaatttatctgaaaagttatcgttacaatatgcatctttgtccaaaatcattattgatcgaagtgggtgcccagacaaacactctgcaggaggcagtcaatgccatggatccgctggcacaggtgctggatcgggtgctgagtgggaaatagttaagaatgataaaaaacacttcctatttaactaaaattagtgtataatactaaattaataagtattcgtgtcggttctgacagaaattccaaggatgaatcattttttataatgtatttaaaaatgtttttgtttcagtttgatcgggacagaggtccattcatattacaggaaccaaatgaattacatcagatagtttactggagggtatattttaaatgagagaaaagtacgagagcttatcgcttgctgttttaaaagaccttgccaagacaagaggattaaaaggagtatctgctttaaagaaggcagatctcattgaacgtatgctgcaggaagatgagaaagaagtagcagtggaaaaggcaaaagcagcagaagaaaaggcaacagaagagaagaagacagaagaaaagacagagtcaaaagataatgcagaggaagcagcaaaacctgcaggcagaacctatgtcagagagcgcaaaccgggacgttacagcaccagaacaaatacgcgccgtgaggacagggatacttctgaccattcagaagaaaagaagacagaggaagaattagagcagatccgaaaggatgaggcatctctagacagtggagaacaggcgaacggtattctggaagttatgccggacggttacggatttatccgttgtgaaaattatctgccgggtgacaatgacgtgtatgtggcaccgtcccagatccgccgcttcaatttaaaaacaggcgatattgtgtgcggaaacaaacgtatcaaatcccagggtgagaaattcagcgccctgctgtatgttagcaccgtaaacggatatccgccgtatgaggcaatgaaccgtaaaccgtttgaagatctgacaccaatcttcccgaatgagcgtctgcgtctggaaacaaagccaaatgagacagctatgcgaattatggatttgatttccccagttggtaaaggacagcgtggtatgatcgtttctccgccaaaagcaggaaagacaactttattgaaaaaagtagcaaccgctgtaaagaccaataatccggacatgcatatgatcattctgctgattgatgagcgcccggaggaggtaacagatatcaaagaggctatcgaaggcgataacgtagaagttatttattctactttcgacgaacttccggagcaccacaaacgtgtatccgaaatggtaattgagcgtgcaaaacgtctggtagagcatggtcaggatgtcatgattcttctggacagtatcacccgtctggcaagagcgtacaacttagtcgttccgccaagtggacgtacgttatccggtggtctggatccagcggcattacatatgccgaaacgattctttggtgcagccagaaacatgcgtgagggcggcagcctgacaattcttgcaaccgctctggttgagacaggaagcaagatggatgatgttgtttatgaagaattcaaaggaaccggtaacatggagcttgttctggatcgccgtctgtccgaaaaacgtatcttcccggccatcgacattgtgaagtctggaacacgtagagaagatcttcttttagataaagaagaacaggaagctacttatattatgagaaaagcattcaacggcatgaagtccgatgaagcagtagaaaatatactgaatatgtttgttcgtaccaaaaataatcatgagttcgtggaacttgtaaaaaaacggaaatttttctaaaaaactgcttgcaatagaaaaaagtgcatgctataatatgaaagctgtgtaccgtgagcgcgcggtacagaaagattaacaagtttattgtttttcatagacgtaagtagaattacaaagaaatttggtatgcgaggtgaaattaatgagagaaggaatccatccggattattatcaggcaactgtaacctgtaactgcggaaacacattcgtaacaggttctacaaagagcgatattcacgtagagatttgttctaaatgccatccattctatacaggacagcagaaagcagctcaggcacgtggacgtattgataagttcaacaagaaatacggcttaaaataatagtaagatatgtgtgaaaatcaggttgaggttgcaaaatctcaacctgttttgttaagcaggaaattttatgttttctgagtttgacgaaacggagaggaatttctatgcgatattctggaattggcggtcaggccgtcatggaaggtgtcatgatgaaaaataaggaacggtatgcagtggcagtccgtaaaccggatcaggaaattgaagtcatgacaaaagaatataaaggaattgttccgggagaagtgtggcagaagattccgctggtgcgcggcgtgttgagttttattgactctctggtgcttggaatgtccacgctgatgtattccgcttctttttttgaggatgaagaagaatcaaaggagaagaagcaggataccgcagagaagaaaaaggcaaaggaaaatgccatgatgggcggaacggtagcgttgtctattatactggcagtcgctattttcatgatcctgccttattatctgtcggtactgtgttcccggtttattgcgagcgatatggttgtagcagtgatcgaaggaatccttcgtcttgcaatttttatcggatatatattgctgatctcaaagatgaaagagattcagcgtgtgttcatgtatcatggtgcggagcataaatgcatcaactgcatcgaacatggattggaactgaatgtggaaaatgtgcggaagagctccaaggagcacaaacgctgtggcacaagttttctgatgtttgtcgtgatcatcagcgtaatcttgtttctgtttatccgtgtggattctcatgcattgcgtctggtgcttcgcttagcactggtgccggtgatcgcgggcgtttcctatgagctgctgcgtgcagcaggccgtagcgataatccggtgatcaatctgatcagtaaaccgggtttgtggatgcagggactgaccacaaaggagccggatgacgacatgatcgtggtcggcattgtttctgtggaagctgtgtttgactggagaagctatattgcagagatccgtgcggaagaaggtatttcagaggcagtcaatgctgatacaaaatctgaagatgctgagcagaaagtgcaggagaaaaagccatgacataccgggaagcaagaatgcaggcagcagcgctgctgaaagctgcaggtgtggaaaatgaggcggcagaaagctggtttcttatagaagcagtttgccagatcagccgcagtttttatctgctgcatgagcgggatgagatgaatccggaacaggaaaaggcttatctggacctgacggaaaaacgctgtcagcggatgccgttgcagtatctgaccggagaacaggaatttatgggactgccctttgcggtcaatgaacatgtactgattccgcgtcaggatacggaagtgctggtggaagaagccattcagatcttaaaaaataagatgccggatgcggaagttttggatttgtgtactggttctggatgcattggaatcagtattcagtccttttgtccagatacaaaagtgaccggggcagatatttcgaaagaagcattgcaggtggcaaagcacaatgcattgcagaatcaggtgccggtgagctttgttcacagtgatttgttttcggaaatttccggcagatttgatatgattgtatcgaatccgccttacattccgagtaacgtgatcgatacgctgatgccggaagtgcgtgaccatgaaccgatgggagcgttggacggaaaagcggacgggctttatttttaccggaggattacggaagaaagcgttgctcatctgaatgacggcggctatctgctgtatgagatcggtcatgatcaggcagaagcagtcagcggatttatgaaagaacatggatttaatgatataaaagtgattcgcgatctggcgggacttgaccgggttgtgagaggaaggagataaactatgtttgacagactggaagatacactggtgcgttttgaagagttactcagtatgctgagtgagccggatgtggcaaatgacccgaaacgtttccagaaactgatgaaggagcaggcagatctggctccgatcgtagaagcatacaaagagtataaagaaaataaacagaacatcgaggacagtcttgccatgttgcaggaggagagcgatgaggaacttcgcgaacttgcaaaagaagaactggcagagtccaaagaaaaagtagaagaattagagcagaaattaaaaatccttctgcttccgaaagatccgaacgatgacaaaaacgttatcgtggagatccgtgcaggcgccggtggagatgaggcagcactgtttgcagcagaaatctaccgtatgtatgtacactatgcagagagcaaacgatggaaagttgagaccatggacgtggaggaaatcggtatcggcggtatgaagtatgtcagcttcatggtaaccggtcagggggcttattctttactgaaatatgagagtggtgtgcaccgtgtacagcgtgtaccggagacagagtccggcggacgtatccatacttccaccatcactgttgcaatcatgccagaggcagaggaagtagatgtacagattgatatgaacgactgtaaattcgatgtattccgtgcatccggaaacggtggacagtgtgtcaacacaactgactctgctgttcgactgacacatatcccgacaggtatcgtaatttcctgtcaggatgagaaatctcagttgaaaaacaaagataaagccttaaaagtacttcgtgcaaaactgtatgatatggaatgccagaaagcacatgatgctgaggcagaggcaagaagaagtcaggtcggaaccggagaccgttccgagaagatccgtacttacaacttcccacagggacgtgtgacagatcatcgtattaaactgacactgtatcgtctggagtccattatgaatggtgatattcaggagatcattgatgcactgatcgcagctgatcaggcagcaaaacttgcgaagatgaatgaaaattaattttatcacagggcaaaagcgattatccagttttagggcaaaagttttagcctgtgagaaaaacagacatcaagtaaaaaactaagaataaccttgaggaattgtaaaaaaacagttccccaaggttttttgtatctgattgggagttttatgtgacttgctgattttaacactttttatgtaaaatagtttttctttgaaaaatagaggaggtgttatatacttattatacttcacaaattaagtgtggggtatcttattttttgcgttcaaaaatgaaagtgagtgcgataagaaaatagtgtataataaatacaatatatcaaaaatttggaggaattacataatgggcgagaatagtgaatgtaagaaagtgctccacagttgtgtcgactgtggtgtaacaaattgcaataaaatggacaagtattatccggacttctgcctgacaacagctatggatgagacactgttaggcgaagtgatccgcttatatgatgacgaggaaaataaaaaagtaacacttgcagcggcaggtgtggagagtgattattattgtcagatgtgccgcgtggaggaaaccattgaatttgcaaaacggatcggtgcaaagaaaatcggtattgctacctgtgtgggactgatccgtgagacacgtacactgaccaaaattttacgcagtcatggatttgaggtgtacggtgtcgcctgtaaagcaggtacggtgcgtaaaacagaagttgggattccaaaaacctgtgaaaacaccggtgtgaacatgtgcaatcctattttacaggcaaagatgctgaatgcagagcacacggatctgaatattgtgatgggactttgcgtgggacatgacagtatgttttacaaatatgccgaaggactaacaacgacactggtggtaaaagaccgcgtgcttggtcataatccggtggcagcattgtatgcagcggatggatattatcataacaaattatgtccacaggattagccaaaactgggattaataaaaaccagaattggcaaaactaagatttgataaaaaatcatttggaaaagaggttgaaacacagtgattcgtttggcaaaggaaaaggatttggataacatacaggaaatctatgtgtatgcccgcaaatttatggcagaacatggcaatccaacccagtggggacagacacatccaacggaagaaacgttacgaaaagatattgaaaaagaacaattatatgtgatagaggagcgggatcggcttcagggagtatttgccctgatcataggagaggatccgacttatcagaatattgagcagggcagttggaaagatacgagtctttatggaacgattcatcggatcgcttctgcatcggaagcccatggtatcatggagcaggtacttgcatttgcgtgggaaaaaatccagcatttacgtattgatacccatgagaataacaaagtgatgcagcatctgatcctgaaaaacgggtttgaaaaatgtggcattatttatgtagatgatggaagtccgagagttgcgtttgaaaaaacatctaaggaagaagatgaaaagaaaatcgcacaaaatccccatatggaagagaaagatttaaaagaatccgatataacagatgcaacagagatagcacatacagtgacatcctcagaagtaaatacgaagcttcagatccgaattgcaacacctttggatgcaaaagaaattttagacatatatgcgccttatattttgcagacagcgattacttttgaatacgaagtaccaacgctggaggcatttacccggagaatcgaacagacattggtgaaatatccgtatttggtggcagagcaggacggaagaatcgtcgggtatgcctatgcaggtccgctgcatgagcgtgcggcttatgactgggcagtggagacatcaatctatgtgaaaatggacgcaaaaggacagggaattgggaaaaaattatatgtagcgttggaagaggcgctgctcagacaacacatagtctgtgtaaatgcctgcatcgcttatccagatcaggaaaaggatgtttatctgaccaaagacagtgtggacttccatgctcatcagggttacaaaatggtgggagaatttcatcagtgcgcctataaatttgatcactggtacaatatggtatggatggagaaaagcctgtgtgagcgtccgcagcatccagagccgatgatctggttttccagactgagaaaaaagaatgcaaaaacggaaccggtggattagagtaggcacaggatcggagcaataacagaattgggataacattagaataaacacggaatcggaatgagagcaggattgggataaaactggaataaacacagggtcggaacaatatagaattggaataaatcttgctgtctgccgcctgatatgctatactaatccagtatgaaaaatagctacaattattatcactgtgtattcacagaaatccgcagaaaaacaggatgactgtcaaaatacatgggagaaagcaactggaaaaggaagtttggaatgaaattaatttcatggaatgtcaatggtttgcgtgcctgtgtacagaaaggatttctggatttctttcacgaggcggacgcagatattttttgtgttcaggagacaaaacttcaggaagggcagattcagcttgacctggaaggatatgaacaatattggaactatgcggagaaaaaaggttattccggtacctcagtatttacgaagcagacaccgttgtccgtacgctatggaatcgggatcgaagagcatgaccatgaaggtcgtgtgatcacactggaatatgaggactttttctttgtgacagtatatacgccgaattcccagactgaattggcacgtctggattatcgtatgaagtgggaagatgatttccttgcttatattaaatctctggaagagacaaaaccggtgatctatgccggagacttaaatgtggcacatcaggagatcgatctgaaaaacccgaagacaaaccgcaaaaatgccggttttaccgatgaggagcgtggcaaattttccaacgttctggcaagcggcatgatcgatacctaccgttatttttatccggagcagacgggcatttattcctggtggtcttaccggtttaaagcccgggagaaaaatgctggatggagaattgattattttgttgtgtcagagtcattaaaagaccggttgcaggatgcgaagatccatacggaagtgtttggatcggatcactgtccggtggaattggatattgaaatataggagtttggcatgaagaaagaacaagaaacagaaaacaataagacagaagaaaaaaaaggtgatatgcgaaaagaagtggttagctgggttcggatgttcgtgatcgtgatcgcggtggttttcgtgttgacgcagtttgtcattatcaatgtcagagtaccgtccggatccatggaaaatacgatcatgaccaaggatcgtctgattggcttccgtttttcttactggtttgatgagccgcagcgtggagatattatcctgttttcctatccggtggatgagaagcagacttacattaagcgtgtgatcggactgccgggtgagaccgttgagatccgggatggcaaaatttatatcgatggatcgtcagaaccgctggaagaagattacttgaaggaaacatggacctgggaaaatgacggttatacgtttaaagtaccagagggatgttattttgtactgggtgataaccgaaacgattcggaagacggtcgtttttgggcacagatcgcgttaaacgagggaaaagcttcgacactggaagaagcagaaccgtacagttacgtgaaaaaagatgagatcaagggcaaagcgatttttaaatattattcaaaattcgcgatattgaccaataaataataaataagcgacagcatatgcacatggaggaaacaaaaatggcagaatcaatgaaagactttgaaaaagaactggaagaatcctataaagtaatgggagacggtgaaaaagataccgacactttactggcatgggagaaaatcaaagagttatatgagaatcaggagacactggatgtaaccgtatccggtatcgtaaataaaggtgtcatcgcactggtagagggtgtacgtggatttattcctgcatccagactgagtttaagtcatgtggacgatttaaatccatggcttggcagagagctgaaagtccgcattatcacagcagacgctgagaatgacaaactggtattatctgcaagagagattttaaaagagcagcgcgatgcagagaaaaaattaaaagtagctgagatcaaagaaggcgaagtgctgactggtaaagtagaaactatcaaagattacggcgcatttgtagatctgggcgatggtgtatccggtctggtacatatttctcagatttctctggatcgtatcaaacatccgtctgttgttctgaaagaaggacaggaagtacaggtaaaagtcattggaaataaagatggcaagatcagtctcagcatgaaagcactgcttcaggaaaaagagcaggaagaagaagtgcatgtggagattccggaagtagaagagatcggaacatccatgggtgatctgctgaaaaaattcaaattttagttaacttaaatttaagaaagcccattgtttcagttgtgtaaaataagaagcaatggggacttctttatatcagaaggggaatatagtcctcttttcaaaaaaataaaaatcggaggagtatcatggcagcaaataagattgtacatgagccgggaaaatattttgactgtacctccatgcatggaaaatggtgtaccattacaatggtgggacaggatgtcggttatgcccgggtaggaattatttcttccggacgcgattatatattgtttcagttccgggataaaacgggactggtggcaaaagcgtatgttaaacatatcgtggaagtcaaaatgaatgaacgtaaattgaaaaaagagcaggagctggtagtgcgcgagtgggatgacagtgtgaatccgtttacctattttctggataaacgctgtgatatccatgtgcatcagacacggttgtttgaagccagtccgggattttttcatgcaaaaattatgtttgtgggtgaaaatatcattcgtatacacgaaaacagcaaagactataatctgaaccagtttatgatctgtggaatgatggagagttgagagggtaaagcaatggagaacgagaaaaatatggcgatgccggaatttacaaacgaagaggttgaaaaggcaatcaaacaattcctggatgaaaaatcaaatgaaaatatggcaaatctgatgcaggcgatgagagatacaagatttctggtaccggcagattttccaccagatattaaaaagcaggtgatcgaaaaagcaaaacgtggggagaagattgatgtgaaaacagcaccacgtatgcttccgattattgttcagaacccacagggggaacattttgcaccggcatacacatcttccaaacagatggcagaaaaaggaaaatatccggcaattctgaatgtgacgatagacgaattgttacgtatcggttctaatccgtcactgaagttgaaaggaatcattgtcaatccagataccgataaaatgatcctgcatccgaaatttatcgatgcgatgaaacagctgaaagcagcgcagaaacagggaactgcaccacagggcaaacctgaggtgaaagaacttaagatgagtcgtgcgcagtttgaattgtttgcccgcagaacctgtgaatggggaattattccgcgagttgtatacaatgaaaatgcagagtttatgaaaaaactggaagagaagcagggcaaatttatggcaacgctgtaccgtcagccatacggtgataaacttccgtgtccgtattctgaaaaagattttgagattatgatccttgatattgacgaggagacctgtgtggcaagcattgagcttccaaaacagaatatggcaccacagatggcacattctatgtacattgtatggaatccgcagaacaacgaaatgcgttatttcacaattgagcagggaatgccgaacgaagacaacgtactttgcagtgtagatgctgccggaaaacgtgaggagcttcagactgctccgccaaccggaagtgagatttctgccgtgctggaactggtgcgtgaggatcgcgaagatgcacaggcagaatagtattcaagaatgctccggcattcttgttgcgaggtgcgcgtcatgcaattgcatgacatacttcaactgcgcacctctgtactcctgccggaggctatatcaaaataacggtattgattattttgaaataattgctataataaataattgtgtttagaaaacagaatagacagttcgtttgtaccatcctgtcgtaaaataaaaccagggctagatcagataatctgtgtttattcgagccgtggtgagagaaagccacggctcttttttggtgatagtacacttccaggaaaaaagaagttgcgctgaattttgggtgaagaaaaattgtgaagcgtaaaagtgagctctggaatagacaataaaaggtatggaatcaggtgaaaggtgcagacgggaaaggaacaggggatttatgtataaaattcgaatagaagaaagttttgattcggcacattttcttgccggatacgaaggaaaatgcagcaatttgcatggacaccgctggcggatcgtgatggaagccaaagcagaaacgctgcatgaagacggacagttacgtggcatggttatggattttggagacatccgcagagatttaaaagaactggcagatagctatgaccatgcattcatttatgagagtggtacgttaaaaccgttgaccgttcaggtattacaggaagaacacttccgtctgatcgaagtaccgtttcgtccgacggcagagaatttttccaaattcttttatgaaaagatgacagaaaaaggatatgacgtgcaggaaattgcggtgtatgagacaccgaacaactgtgcgatctattcagaaaattaagatggagaacagaattatatggcaaattataaagtggtagaaatattcagcagcatcaacggagagggcacccgggcaggacagcttgcagtgttcattcgtatgcaggggtgtaatctgaattgtgcctattgtgatacgaaatgggcgaacgaggcagatgcgcggtttcgttggacatccacagaggaaattgtggaactgctccgcacgatggagatcaaaaatgtaaccattacaggcggagagccgctgcttcaggaaaatgttttagaactgttagagacactgtcgcaggaaaaaacattgcgtgtggagattgagacaaacggaagcgtggatctgacaccgtttacagaaattccgaacggaccgtcctttactatggactataaactgccgggaagcggaatggaagcgcagatgcgtaccgaaaattttgccctgcttggcgcggatgatacggtaaaatttgtggtgaaagattatacagatctgtgccgggcgcgggatgtgatccgggaatatgatctgacagaaaaatgtcatgtatacttaagcccggtatatggacagattgaattggaagatatcgtaaactttatgaaagataaccgcatgaacgatgttaacatgcagcttcagatgcacaagatcatctgggacagcgaaatgcgtggcgtgtaggatatcaggaatcgacgtgatgacagaaaggagtcgtaagttatggcaatagataaagacgcagtgcgtgagcatgtccgtggactgctgatcgctctgggagatgatccggatcgtgagggactcaaagataccccggatcgtgtggcacggatgtacgaagaagtgttcgagggaatgaattataccaatcacgaaattgcacagatgtttgacaagacctttgaagaagatctgacattttcgtctgaaaacagtgattttgtcattgtaaaagacattgatattttcagctactgtgagcatcatatggcattaatgtatgatatgaaagtgactgtggcatatgtgccaaatggaaaagtcatcggactgagcaaaattgcccggatcgcagatatggtttccaaacgtctgcagctccaggagcgcattggaacggatattgcggagatcatgcaggaaattaccggatcagaagatgtggcagttctgattgaaggttgccatagctgcatgactgcccggggaatcaagaaaaccgatgcaaagacctatacgactactttgcgtggacggttccagaccgatatgctgctgcagatgcgcctgaaccggtaaaatgtgtaaaatacgaaccattgaaatacaaaatgtaggatgaaatgtaaacatagaaaatagatagagaatctggaggaaaaaacatgagtgaaaaagcattagtattattcagcggcggcgtggattccaccacctgtctgggacttgcgattgaccgttatggaagagaaaatgtcattgcactgtctgtttcatacggacagaagcatgaaaaagagattgaagcatccagaaaaattgcagaatattatggtgtagagcatttgtatttggatctgggcgagatttttcagtatagtaactgttctctgctcagtcattctactgatgagattccggaggaggcatatgccgagcagctcagcaagacagatggaaaaccggtgtctacttatgtgccgttccgaaacggactgtttttatcctctgcagcaagcattgccctgtccaaagagtgcagcgtgatctactatggcgcacacagtgatgatgcagcaggcagcgcctatccggattgctccgatgctttcaataatgctatgaaggatgctatttatctgggaagcggaaaacaggtgactattgaagcaccgtttgtcaactggacaaaggcagatgttgtcaaaaaagggttacagttgaaagtgccgtatgaactgacctggagctgctatgaaggaggcgagaagccatgtggaaaatgcggtacctgtatcgaccgtgcagcagcttttgagaaaaatggtgtgaaagatccggcactggactaaagtgctggaataagagaaatatgctgtctgaatttctgaaaagaaggcagattcaagtcgaatttgaaatgagcagatgtatgacagtatgtaaacgtagaatgcgagaaatgaggaaaaaataaatgtcaggaagaagtaaagaagaaaccgcaggcgtatccttgcttggaaatcagaatgtccgttatccggacaattatgcgccggaagtattggaaacttttgtgaataaacatccgggaaatgattattttgtaaaatttaactgtccggaatttaccagtctgtgtccgatcacaggacaaccagattttgcgaccattacgatttcctatgttccgggggaacggatggttgagagcaaatccctgaagctgtatctgttcagcttccgcaatcatggagatttccatgaggattgcgtcaatgtcattatgaaagaccttatcaaactgatgaatccgaaatacattgaagtgtggggaaaatttactccaagaggcggtatttccattgatccgtactgtaattatggtaaaccgggtacaaagtgggaagacgttgcatggaaccggatggcaaatcatgacttatatccggagaaagtagataatcgttaatagaacgtagaagtgtgaaaatgacctgtaggatgtagggatgtgcggaagaatagatcatgtgttgtgtgatgcacatttcacagtaagaatgtggatgacattcctggatgggaggaagaaaaacatggacgaaatgaaacgaattgaccgtgtgctgaaatataaaggtgccattgtggacgtgtatgatgatgttatgcagtccccaagcggaaatattgcacactgggattatgttgcgcaccggaaaggcgcagcagcagtgcttccggtaacggaagacggcaaaatcctgatggtgcgccagtatcgcaatgcactggatcgtgagacgctggaaattccagccggctccagagacagtgtggaggagccgacttctgtttgtgctgccagagaactggaggaagagaccggttataaagcggctcatttggaacttttgatcacggtttccaccaccgtggcattttgcaatgaaaccatcgacgtgtatctggcgacagatctgacgaaaacacagcagcatctggatgaggacgaatttgtggaagtggagagttataccattgaggaattgaaagatatggttctgacacagaaaattcaggattccaagactgttgctgcaattatggcatattacggtaaatactgcatatagatgaaaaaaaggattagcagggttaccgaaatagatgatcacaggaactttacgacaaccgggaaaagtaacaatgctgcaaaaatgcatgctgctttttcttggttgtttctttttgggtgtatttctggcaaatttttcacttcatgatgaagcattgtggatcggatttctgcatgaaaatcaggtgcggcagtttgcgggtgcagaggatgtggaacatgcagaagcattattaaaaaccattcttttgcagcgtggacttccatggatgatattattgattgcattgtgctttcgttttggatgcgccgtttgtgctatctggtttggatggcttggactttccggtggttttgtgtttgcggcgctgcttgggcggtatggattttccgggatcgggcagatgggaatccttggatttccacaagtcgctgcttatgcggcagcgtacatttttttattagttctgatggaagctggaaaacgtgtcagacaggagcgaagaaatgcacacctgttgaaaaataaaccagatctaaaagcacaggcattattgatcgtactatttttattggatacgggaatttatggagccggaatctggttggagtattgggtaaatccgtggattttattacatacagctgtcgttggatgacagaaaagtaggaacgattcctgattttgcgttgagatatgttgtgtgatagaattgtatcttgtgatagaagtgtagctgatgaaaaggaaagattagtactttgactataagccccaaaatgatcaaatacgataggatgcttgaacaaaaaagataccctgatcttaaaaataagaaaaggatatcttttttattttgatgtttattatttttgatttttctattactgatttaatgatacaggtaaaactattttacagaatcagcaatagcataaagtaactgttcggattcttcccatccaagacacggatcggtaatggattttccgtaaatatgttcaccgatcttctggttacccgggcagatataactttcgatcataacaccttttaccagtttgtggatgatgtcagattctttgcggttgtgcattacttctttgacgatacgaacctgctctgcatattttttgtttgagttagaatggttggcatctacgatacaagccggattgaccagatccattttttcgtacatctcattcagacggatcagatcttcgtaatgataattcgggatggcaacgccgcgtttgtttactgcaccacgcaaaataacgtgggagagtgggttgccggtcgtgtcaacttcccatccgcgatgtacaaaatgatgtggatgctgtgcagcgtatacagaattcagcataacagagaagtcaccactggtcggattcttcataccgctggctacatcaaaaccactgacggtcagacgatgctgctgatcttcaacagaacgggcgccgatggctacataggagagtaaatcattgatgtaatcccagttttccgggtaaagcatctcatctgctgcagacagaccagtttcttcgatggcgcgcagatgcagtttacgaacagcgatcagtcctgcaaccatatccggttttgcttccgggtccggctgtgtggcaattcctttgtatccttcgccggtagtacgcggtttgtttgtgtagatacgcggaatgatgatcagtttgtctttggtctgctcattgacttttgcaagtctgtgaatataatccatgacaggttcttccttgtcggcagaacacggtccgatgatcacaaggaatttatcggattctccgcgcagaacacgggcaatctctgcatcacgtttctgtttgatcttctggcaggcttcgcttaacgggtaagtctgtttgatttcttccggtgtcggtaattgttttaaatatgaaaaactcattgtgttactccattctgtcccgatattgcttttggattcttacattaataaatataagagcgggacattttgtattttaagtattttgttcagatgtgtagcgtgcagtggtacttatggctgaaaatatttctgccgaacaacttcaatcggcattttttcgcctgtccagcattcgaaagaagcagcgccctggaagagcagcatgtacattccgttaaatacgtgacaaccggcagcttctgccatctgatataattttgtcttacgcgggttgtagatgatgtcacatacgatcagtcccgggaacagcatagatgcatccgggatcgggcatccgtcttcgtgaggtgccatgccgacgttggttgcgtttgtcaggattgcgctctcagagatactttttctcatctgatcggtgtctgcaaaatcatagacattgatattgcaggaagtatgctcgcggacacggtctgcaaatgccagtgcacgttcatattcttccgtaaattcttttagctggaacatatcgatgtcggagacaccgtctaaagctgcctgtgtgcagatcgcagtggcagcgccgccagcgccaaggacagtcattttctttccgataatattgtgtccggcatctgcaacagattccataaagccgataccgtcggttgtgtgaccgatcagtttgccatcttttgcaataacagtattgcatgcctgtgcgatggtggcagccggagtcagctcatccatgtattcaagaatctgtactttgtacggcatggttacattaaaaccttttgcaccgattgcctgaagtccgtgtacggcagtaccaagatctgtgttcgtcagatcaaaagccagatatacatagtcaaggtttaactggcgaaatgcttcattatgcatttgaggagatacgctatgcgcaacaggagtgccaatgagtcctgttaatttggtttttccagtgatttccattcttcttccctaccttattaataatcagattattgtgttctgccccatgtgaatgccatggggaaatacaaaatagttcgtctgcaaatatatatggtactatgataggtgttttttcaaaaaaagtcaatgtctgtcggcttttaaggttcctcaatctgcaaaaatatggtacaataaaaaccgttaagcgcattgcggaatggaggtaagtatgcagaacgcatttgaaataaaaggaatccgaatcggagatggcaagccggtgatctgtgtgccggtagttgcaccggaaagagaaacaattattgaaacgatcaaatcactgacagaacaaaaagtgcagatgatcgaatggagagtggactgttttcgtgaggcagatgatgtggcggcagtcagagcagtactggacactgtaaaaccgttcctcacagagacgattttcctgtttacgttccggacaaagcagcagggtggaagccggagaatggaagaatggaagatcctgaaactgaatgagacagctgcaaaaagcggttgtgcggatatgattgatctggaattttttgaagcaacaaaaccggaaaaagagatccgccggtttcagcggatgggcgttcgggtgattgcttcccaccatgattttgatgcaacaccggatgatcgtattttgcgaatgctgatggagcagatgcagcagggcggcgcagacgtggcaaaactggcagtgatgccgcagagcgcggatgatgtggttcgtctgttaaaactgacaaatgatatgaagcagaaatatccgactttgccggtggtaaccatgtccatgggtgcacttggtgttgtcagccgtatggcaggagaaatttttggttcctgtattacgttcggtgccgtgggagagacttccgcaccgggacagatcgcagctgacaaattagaggatattctgagcgtgatccatcagggattatgttaaatagtaaaaggagaagtaaaaaagtatgacacagcacatttatctgatcggttttatgggaactggaaaaacaacgatatcacataaattacaggagctgaccggtgccaacgaagtagatatggatgcatggatcgtagagaaaaatgagatgtccatcaacgatatgtttgaaaaatatggtgagacctattttcgtgaccgggagaccgatgcagttcgggagatttcacagacggaaccggcaatcgtgtcctgtggcggaggcgcagtactccgtgaccagaatacacagatgatgaaggagaccggaaagatcgtgcttttgacagcgacaccggagacggtatatgagcgtgtcaaagacagtacagaccgtcctttgttaaatggaaatatgaatgtggaacatattgcgaagatgatggaaaaacgccgggaactgtatgtgaatgcatgtgacattaaagtggcaacagacagaaagacaccgcaggaaatcgcggaagaaattttgaaaattagtcaaagctaatcatttttgagatgcggattttaaagatttaaccgtattgaatttatggaaaagatacttgattaaatgaagagtgtgaaaaatcaacgtatattttatcaatgaacagaaaaataggagaattttttctcgaggagcgattgttagcgacggagacaaaattctcctatttttcgtccgttataattattatgctttttaactttcacgaaaaaggctttgctttttttacaatcctgtggtattataatctttgttgatttaacaatatatttttatgcagccgtagtctaacggatagaacacaggactccgactcctgcaatgtgggttcgattcccgccggctgcactctgattcccggtttgagaccgggatttttttttcagatagtacgataaaagtgctgtcggcatggaatataaaatgatgtgcagcaataaaaagcaggtatagaaaaagttgaatatgatattcatagagaactggcatatgataaaaaacttgaaaatttgccaaaatatgctatgctaattctgagtatgaaaaattaacaaatatattaattacgatagataaattaggtgagaattgaatgaggaagacaggcaaaaaaggatttacgctgacggaattaattgttgtacttgtaattatgggcattattgccgcgatcgcagttccgttgtttacgaattactggagaaatgcagagtttcgaaagaatgaggaaaatgccaggacggtgtatctggcagctgaatcgaaactcacatattaccgttcttccggtcaatgggacagctttcaaaaacagatcaaaaaacaggcagaaaaggatcaggtgaaaagtgcggaaaacagaaccgtagaagaagcggtatttcctcctgatcaggaaaatgccgtacagttaaatggacgtatttatacattacgactggataaaaatgcatcagatgcggatcagaaaaataatctgcttttgcagttgattgatgactatatttacgacaaagatatgctgaatgcatcgatagcggtggagatcgatattgaatccggcgaagtgtattctgcattttatggttccagatgcaaaggactgacgtatgaatctgaggataaagatgattatctgaccatgcagaagcgtgattatgacagcagaaagaaacgcttgcttggttattattctacggaagatacggtaaatgtggtatccctgaagccaacgaagcttcgtatcacaactatcagtctgcagaacagtgagaaattgacactgaactggtcttcgaatgcaggagaaagtctggatgtcagctataagatcgcaatgtacaaaaaagacggcacaccgttattttccatggtgctgtctccttttgatgtccgtacggaaggatggtctggcaaggatgagagcagtacctatgcatttgccagtgtaacacttctggatggatcaggtaaagatcagggaaaatggagttttccactgacttatagtgataataaatattctctggtgctggatgcgatgatgtctgccaaaacacaggcattgctgacttcccgtaccggaacagacagtgaaaatgcgttattaagaacgttaagcacaagcatctgccgtctggcaggaatgacggaggatcaggcgcttgctacaccgcaggatatctatgcgacagtagaggcaatgtcctatgccggaacggacagtcacgtggtcgtttcaaaagaatacagtgccagtgatgcggcaacttctaatacggcaaacagtatgtatgcggataaaacggatggaagtgatgttcggatcgcagtattccgccacctgtcgaatatgagatattatgacgatacgaaggaagctgcttttacgctgacggacaaaaatatggactgggcatcagtaggaaccggtgtgtatgatctgaccgaagaacagagtggatcgaatacattgcagaagcttgcatggaaagaaaacagcaccagcaagacggtcgattttccaaccattgcaaatctgccgaaaaagcagacattgacagggaaaggaaaacgtacgctggtgtctcatttgaaattaggagaagcttccattgttgatgatgagacaattaacaatctgacacaggcagcgtcagaatccagaacaagagcgagtgtacaattaaatccaatggaatatctgggcttgtttggcgaaatagagggaaccattgataatgtgacacttcaggatgcacatttgtcctttggtgtttcttccaaggatggagattccaacacagcagacagcaggggcacgtatgcttccctgaaaggaatcggtattttagcaggccgcaatgcgggaagcattaaggatacatctcttacttcgacagaagattcatcttctgatcaggcagaaaaaaatgtagaggtttcactgtcttctacagcagtttctgccaacggaacgcaacaggcagcagtaggcggtgttgttggtattttggcagatacggataaatccggcaatctgaccacactgacttctggaaaactggagaacgttaccatggaaggcgctgtaaaagtgcagcttccgaatgtatctgtgacagcagatatttcttctgaaaatgatacattgaaaaattatgcgcttggaatcggcggaatcgtaggatatgcgaacattgagagcgcaggcggagaaaagagcgttattatttcctgtgaaaaccatgcgggtgtgtctggcaattatatgacaggtggaatcgccggtaagattgatggcacggcaacgaagtttgaccagacaacctggaaaaatgacgctgcgatcaaagacagctccaataccggactgatcctctgtacggaagatatgccagcgactgtcgttggaaattattttggcggaattgccggttatgcttatcagacattgatctacaactctaccagtgcgtccggtcgaacttccgggtttacatataataaggataagaaggacttactgaaaggacagtacgttggtggaattgtcggatatggcaatcacagcctgatggcaaactgtggaagcgaaagcaacggttatatccttggctccaaatacgtcggaggaattgccggtggactgggcggaaatataaatgaggcaattcaggcacaccagcaggagagtgtatcggttacgacgaaccgaagctatgtcgttggaaacgaatgtgtcggcggaattgtcggacataatacagctggtgttatgttatctaactgtatcaataacggtgtggtagcaggaacccaaaaagataacggagatggcggtcgttatgtcggaggtatcgtgggatacaatgcaaatggtgcgaccatccataactgtgcaagttatctgtccgattatggcagctctattttcaatatgatcgtcaatgactgggatgccaaaagtgattatgtcggaggaattgccggatataataatggatttattgaatttacaaaagacagtgaggcaatcacggtcaaatctgtatccagtattgtagtcggaaataattatgtcggaggaattgccggattcaatgatgtacaggcaacattggatgtaaattataccctgatcggtggacagatttatgcttatgagacctgtgccggtggcgcatttggatttaacgcatcggaaaatgtagcaaggcagtctctgactgtaaaaccacgaagtgtacagggaaaatattttgtcggcggtgtcatgggtgcaaatgtcctggctattgacaaaaatacaacaatttccggtttgcgtgcagaaaatactttgggaaccattaccggagaagcattcactggcggcgtgatcggctatcagagaacctatgatgctgatcagttaaactataaattagatacaaatgaagatggaatccgtgcggcagtagaggcggcgcagaatagtaccagcagttctgacagactgttgccgggaatgaacgaaaataatataccaacagctgttatggcatccaagaattcctatacactgacgatcagtacagaaggcaatacggatgattccctgacggtcaatacaaacaatattccaatccagacggtaatgtattccggtggcgtacttggctattgtgacaaaggctcaaagattgagattaagaactgtaaaaataccggaagcattacatttgcttctgatttgctggaaaaagatagtactggaggaattaaactgggcaagtatgctgccagtggagaaattccggaacttcttaccaaggatgcttccgaactgaaaatgcattttattggtggaatcaccggtgtgaatttacagaatgagaccattacgcattgtgccaataccggatctctgtccggatttaccggaattggtggtgtggttggcttgaatgcaggaaccgtcaaaaactgtgagctcagtgaacattttggaaatgtggcattggaatatgtcggtggaattgtcggcatcaacagcaatggtggaacgatttccaagtgtactacggatgcgggcaagaccatttccggaaataatcatctgggtggcatcacaggatggaatctgaaaggcggtactttgactggaaatgagaattacgcaactgtcaatgcatccggaaaagataactccgattatgcagccgttggtggaattgccggtcagaacagtggcacgattgttttacagaaggacagctctacaaaaagccgttcggtatcaggcgcgaaaggtgccggcgttggtggactggttggtatcaatgaatctgacggtcagattcaggtaaccggaacaggtggcaccagtggagaaattattgttgtttctaataaagtaacggtacagggatatgagcaggtcggcggaatcgtcggcatcaatcatggcaaatttagtcattccggaagtccagcctatattacagcacaggcaaagaaagtgcaggcgtcccacggaaccgctggtggagtggtcggtgtgacagatggtgatattcattatgccgtgaaccgatgcgagagtgtcagtgccgatgcaggcaatgcaggcggtatcgtggcggaaaatacaaataaaactgcaatcatcaaaaactgcaataattatggaaatgtcagaagcagtgacgggtatgccggtggtatcgtggcaacaaatgccggtatgatccagtattgtcgtgtacagagtcctggttcttcaaacagtgtagaaatctatagccttggtgtgaatgccagtggtgcgattgctgcaacaaacagtggtacgatcacagattgtcttccgggagcaacggtaatattgcgcggtaatgcaactgtttatggaggaattgtcggggaaaataccggtaaagtaacatctgcagctttaaatgcagcaggaaccagtgcttataatctgagttatatgccacagatcaaatcagataagaacggtctgaccgttggtggtgcagttggctccaatacaggtgtcgtatccggcattgtggcaagcaatctgtgctttgaaaatttcagtggttacaagtatctgggaggaattgttggtacgaatggtgtgacagtaaaccagaatccgcaaaatgccggtgcacagatcagtgtaacaaactgtaaatttaccggaatcatgacagaaaaggtaaatgccggtgcagccggaaactgctacggtggtattgcaggtattaactatgatgagttgaagaacaataccgttgatcagatttcgatgaatattcagggtgtatacacggcaaccagtacaagtaccacagcgcagaaagaggcaatggcaagtcatgccggaggaatcgttggaaaaaatgaaatcaatgcactgattgatggttgtacgttaaccgataacagtcgaagtgttcttcagacaaaatttggcatgttaggtggagtaaccggatttaataaaggtacgatccagatgtccggaagtagtattactgcaagcattatgacaacggatagtataaaagattccgttacactaacggacgcagcagtggataaaaacaagggcaatctgtcggcagacagtaatccggtcaactggtcatataacaatggatttttgctggaaaatgcaacttatcaaaatacaaatacaaagatttctgccaaccgtctgaatctgaaaatgacagacaacggtaatgtgggaggcattactgcatttaacagcaccgaaggtttggtaaatcgctgtgtatcaggaaactggttcctgctgaaccgatccgaggcaattggtgttggtaccggtggaatcattggcatgaatgaatcagaaaatgatctgacctgtctggtcaatggagcttttgtgggacgtcaggtatctgcaaaaaacattaatggtaaagattatgaacagggacagacagaccgttttgcgggtggtatcatcggtaatcagaatacttctaccggaaatgagtggacaatcgaaaactgtatcaatttcggtacggtatattgctatcgtactcattattccggaggaattattggtcagtggacagcatctggcggtacgatcaaagattgccggaactttggaagtcttcagacgacctatcagtgtgactggaaaggtgcctccggcggtattgtagcacagttgtatcatgcttatgaggacaatgaatacaatatcatcagttgtgaaaaccatggaaatatttacatgcgtgatggcgcaagtctgtctggtgattcgcatggcgcgaacgatagtgcgggaattcttggtaatgtgactacttataaggttgataatgctgaacgggcacagaacttcaccattcgaattctggattgtgtcaacggaccgggtgtgaaactgtattcagcttctatgggagccggtattttcggttacctgtcctgcgataatgcaagtgtagatgcaatacaaaaatctacctgcaaggtaaaaattgatgttgaacggtgtcgaaattttgcaaacgtactgcgtggcagatctttctgcggtggtatctttggtgcccggtattctgtaaccggttggagtaatacgattgtaaaagattgctattctgcggatctggcgacaggtagtgctgaaaaagacaagcattatactccggaggggagtccgatttattccaccggaaataaccatgaaggcagcgtagcgaatattgcgaatgcggaggatcgaaaaaataatttctttatcaatggtagagaggctagaaagtatggttcagactatggctattactttaataaatttgttcttggaagactgaatgctgatggaagtgtacaatcgtacggaactggagaaacaaatgtaggggttaccagaagaacaaatgcgacatggaataactatatcagtaatattcatgcggttgcagtagaaaagactgccagtggatatcggtatgcctatgcagaaatttacagcggatgtaatacgatcgggagcgattgctttgtagacgcaaatggttatattgtaaaagcggataaaacaacaagaatcggtcagattctgttctatacatgggacgaggatcacaaagatcatgataatttgtattataaatgtacagaaaaaggactgttgaatcctgatggaaaaaatgatgctatttattacaattcccgtgagagctatcgacgtctggaaggaattataacagtaaatgataaaaaccagcttcaggcgccagtatatgcaaaagccaaagtggcagatggaatgattgacattgctgttacgcccggaacacttccaacggataattctcagttatgtgatccgtttgcctatgtggtaaaaattgttggaagtgatggaaccacagtagaaaaaacaatctattctgaaaccggaagctttgaaatcccgaaaggtatatctggaaacataaaagtttcggttcgtgcaaaaagtatgttctcggatgtattagattctacggaatataatgcagatgtcgtacagagtggtgctgttcttccaagtccggatgtccgtgcagagttaaccgtacagaacaagatcagcggatggagaacagattatcgctattcctttagcctgaataatctggaggcttacagcgaatacgatgactggaaagtgacaatctatatcaatgcatatggcaaagatataaatgtggttctggatgccgatcatccgacagcagtgatgacagatctggatcttggtgatcggggtcaacagaaacggaatgacaggaataatacctatcagatcatttcgcaggcgactgcaacgacaggtaaatatgagagttcgccggtgatttctacggcggcatatatgccatattatcaggcatttatcagtttgaatccggcaaattcccctggaacagatactgtgacaaaccgtgcaactacaagctataccatttccggtgacacgctggataccttaaatgtaaatgtgtcgattgataacagcaattccagtgaaatcctggaagttgcaccgatttatcgggcagaattaattggtaactggggagataaaaaggatgttgtatttgccaaaacagatattatgaccgtatccaagggtgttgcaacggcgcagtttagcaatttaccggaatatctgaaagatgcgacaaatcttcatgtcagattgtggtatgcacagacaggtctgggaccggtatatctgtatcatgaggcagataatgcttcggatgcgaacgtcagcgaacttttgaatgtggacgaaaacggaaatgagacatggggatattgttacagctggccgattcgaaatgagtggaaagattttaatgcatacagggatgaatccagtcagttatttacctggcttgctgctccaaaaatggatcagacagacggaagtacattaacgccgacttacgacagcgacaaccggatgcagtatacgttctcctgggacaagaatgtttctactacggatgatccaaaatatgaagtttccatgaccggtattgatgcaaatggcagagaagtcaccattgataccagcagcagttatacgggtggtcgaagcatgaccatcgatggagaagactggaactatacccaggtacgcctgaaagtaacacgtatcggcgacgcttcccagaagaagatcggtctttccacaaccgcaacctattatgttgcacagagactggaaaaaccgggacagtcttccgtgacaaatatcgacgacaatgaattgaattacaatgttgtctggtccggtatttctgatgaaagctattgccagggctatcagatctatgttcgggagtacagtgcaacaggtagtcttggaacagcagaaaaagcagggactttagaaaaagcaaccggcgcggcaacttattcacagatggtaaatctggaaaaatatgccggaaagcgaattgttgtttatctggtggcagaatccagcaacagtgcggtatttatagacagtgctgtcggagtaaccagcgagattcaggttccggcgcgtatcgcgtcaccgaaggtaacatggaatgtgaactggacgtatgatacaaatcagccgatggaaagtgcagacttcctgtcaggaggacttcgtgtcggacttagagcagatagttcaagtattccacctggaggcagtgcatacttactacgtgcttatgtatataacagtctgagtgatgcaaatcaggcaacagcatccgatccgggtaattatacgacggtatatccgaccggaaatgtaccggtacagatggatgtgtcaaatgcacagaattattatcatttatttgacaatctgtccattaaatatgccggaaaatgggtggtattttatgcgcgtatttcttccggtgccggaagcgtaagttcgctttggacgagatcaacggtggcatatcagctcccatatgtaaaactggcacagcctggtgtgacatccgatacaaaatcttacagtctggaagcgacggtacagacgacaccgaacgtaccgggaagtgtacagatctggaatgcaagacacactgttctggaatggaacagcgtggactgtgcagatgtgtacagcattaatctgaccggtcaggtgacagatctgacagcggcaaatggaatgaaagcgttacagccacagattcgtgtgctggagacaacggatgcttccggaacaaaaaaggcaagcgtacagcaatatgtatggaaaattataaaagaggcaactggaacacagccggcacaatggggatatgcatgggaggccattgcagaaaacccgacaagctatccggcaaacacaccggagaccgataaagtacatacctgggacatcagtacttacagtgtgccgatttcatccagctacacagcggaaagtggtaatccaaattactacaccttgacgctgacggcacaggtggaagcacagcttcaggcagatggcagcatgcattacacgttgaaactgccggatgtggaacagatgacagcggcagatggcagcacagtaacacataccgatttcacaattacaaatatggcagtgtttattgcaaatgttcagaaaaacctggaggctacaccaagcagtgcttatgcggcatctgatccttgcgagatcaaatggaataactaatgatgtaaaagttacaatggaggaagttttatgataaagaaaggttggcagcagttgcggcagcagaagaaaaatggaatatcaatggctgtggtactctgtgtgtcagctttctttgtcgctttcgcggcggcaatcctctataccgcgggaatgttgacggcgcagtctaatctgcgtctgaaacaggagcggtgcagccagcttgccaaatcggcggcagatgtattggatcaggaacttcaaaaatataccaataaggatacgacagaggcaggaagcgacagtttttatacctttgtcaacaaatttttggatgattctcagtatctggattacagtgaagattatccggatgcaacaaaatacaattttctggtttcagacacggatctgtcggatctgtcaaaggcggattcccttccggaaggatatggaaatatcagaattgcattgacaaaagaaaaaaatgcatcagaggattcggacagtctgaaaaccggagagatccatacagctgcaaacaatgctgccaattataaaacggaaattgaccgtatacgaaatattaccgttcgtgactacaatttttctgtggcagtaactgcttcctatgaagatgcaacgtatacctatacaactgaatacagccgtgaggaaaaatatgacgttaagtttacgcataatggaaaagtaatcgtgtgggatgatacaaattcctgctggagagtaggtaataccagtggtgaggtttatacaccggatacatcacagaacatccagtatgaatttttaaatacaactacatcctgtgtgttcaaggaaaatgtgtatactgagacagcgggaggaggaacagcaggtgatgattaaaaaactgagagaaaaatcaggcgagacactggtggaagtgttagcaagcatgttcattttcctgattctgtttggaattcttcagggagctgtttcttacagtcatgcatctatgcagaagaataaacagatccgagaggaaaatacacagatcattcaggggcttgcttctgcacagaaagtagatggagaaagtaaaacgttatcctttattgcaacaacctcagagatggataagaaaggttccgttgtatttcgagtgccgttcactctggtcaccaaaacggtaacgtatcaggatacaaatgggcaaagcaaaaatattgtgttttccctgtatgatgtttctgcggatgcgtcagtgacaccgtctgaaggaggagatactccatgaaaaaaataagacggctattaaataagaaggatggcacgacactggtggaaaccattgtaaccatgctactgatcagcattatgtttgccatggcagctacggcattaagttccgctgcaaaagtgtttgtccgggaacagagattacagtacgcacagtcgattttggatacaactatgacagaattgcgcggaattgtcgaaaatgcagacggatacattaaaatttatgacgttgaacgcaaaaaaaatcaaaaaattacagataagactggaaataattcgggaaatatattagaatttattaatggagacggttatgctgtactgatttccgcggatggctgcgaaaaaacgcagctttttatcggtcgacaggagtccggtgaagcagatgcggtggacgaaggacagctattgaccagatactatttttacaataatggaacgtatcaatacacctggaacgatgaaccggcagccagagctgtagcaacggtatttggtaaagggttttacatgggcaattatctggaagttcaatgggcatttccggatagtgtcaatgcaggtgatatgacagatcagcttacagttacggcatcattataccgtgacagagaccgcacagatctgattgtaacagattctgaggtaatccagcttcggcatagtctgatgcgaaaggatacggtgacagctacagttgggacagatgcaggagagtagctcctgcagaaaagtcaagaatgctattggcattcttgctgtgagatgcacgtcatacagtgtatgatattattattctgtgtatctccgcaatctattatttcaggtatgaacgctgcaccgaagcgttgatataatacaaaccaataacaaatatttttactaaggagagtatgagaaatgttcgcaaaattattcgaattaagaaacaaaaaactcaaagacaacaagaagaaaggatttactctggtagagctgatcgtagttctggtaatccttgctattttagcagcacttttaatcccggcactgacaggatacattaataaagcgaaagagaaatctatcgtagctgagacacgtcaggcagtaatggcagcacagacattagtagatgaagcgtatggtaaattagatttaacagcaacagatgatgcaattgtgattagcaccggtgccgttgaaggtaagactgttgtaaaaattagtgacattgcaacacttgcagaggtaaaagaagcgaacattacgtctgctactgtaaaagccggtaaagtaacagggctggtatatactaatgatggaaaaacttgtacatatacagcaggaactgatggcggtaaaggtacatatgatgtaaaataacaaacgttaagcaatgttttggagaggtaatccaatgtcagtcacagcatccgcgaaaaccacaactaaatatcgttggatcaggttgacaatttacctgctgatcataatcctgcttgctattgttttagtagttcctggggcgctccggttaatctaccgggcagactcccaggtagctctggggaatgccaaatcggtgcggatggcaacccaggtaattgcaacacaacagtatggcggggataatgctttctgcgatgctacccgggagggaggcatcgcagatggcttatatgaggaaattttacagttaagtgaagcacccggagatttctggattcttcagatggaagacgacggttataccgtacgccaatttgtttaccgggaaaatgaatataccgtatggtatgatgcggatgccgatgcgaagtaccttgtatatcatgaagataatatcattcacaccggagactgagatgttagtagcaatagagataatcattaaagtaatacagttctttttcggagcatgtatttttagttttttgaatgtggtcattgaccgattaccgcgtcaggaaagtgtggtgcgggggagaagccattgtacaaaatgtggcagagagttgacagcattggaattgattccgtgcatcagttatatctgtcttggaggaaaatgtaaaacttgcggtgtaaagataccgccgagagattttatagtagaaataattggaggagcagcatttattggctgtggaacttattttggctgcggcaattcggggattatttctctgagaggcgcagtaatttttgtgtatttaggaatattacttgtagtagccctgatcgatcaggatacacagatgatatatgatagatttcatgtaatgattctggcgctggcgatagccgcaatctggttattcccggagtatgggatcagaagtcgtct

SEQ ID NO: 13300 - DNA, 8837 bp, Unknown
  gut microbiota DNA sequence
tgctggtgatcagcctgctgattccgggagcttttggtggcggagatatcaagctgatggcagtatcaggcttgtttttgggagcagcgcctactgtatgcgccatgtttatcggtctggtgaccggaggtggttacggagcatatatgctgataagtaagaaattagaccggaaagatcattttgcgtttggtccgtttctggcatttggactggcagttgccgtgtttgcaggagaccggatcgcggaatggtatctgggaatgttatagagaacagacagtaggaatatagacagaaaggaaatcagaggatggcacgttttcgatatgttgcgaaggacatgaagggaaagagacataaaggcacgttggaagctacagctgaaaatgtgttgcagcagcaattgcgggaagaaggactttttctgatcagtgcaaaaaatctgacggatacacatgggtatcagaagctgaaagcaaagcagcttgctgtgttttgccgggaattatcaacgttgttggcatccggtgtcagtctggtacgtgcgttggatattatttcgaatcaggagggaattccggattcggaacgtgaagtatatcaggatgttttacaggatctgaaaaaaggtattccgttgtctgaggcgatggagtccaaaaaatgttttccggagctgatgattggaatgcttcgttccggcgagggaagcggtaatatcgatcaggtgaccggacgtctggcaacacagtatgagaaggattataagctgacacagcaggtgaagtcagcgatgacttacccgatgatcctgctgatattgtgtgtggcgatcgtgattttgatcgtaacctttattttaccgcagtttcagtcactgtttgatcagatggattctcttccggtgccgacgaccattctgatcgcgtgttcgaattttataacgcagcgttggtacgttgcactgatggtcgtatttgcgatcgttgtggtagtaaaactgatcgtggggattccgggtgtgcgaagaacgctggatcgtggcaaagtgcggatgccggtatttgggaatttatttaaagtaatctatacagcgcggtttgcgcgtacgttaagcagtctgtacagtagtggtatgccgattgcgactgctattgcaacagcgggaaataccattggaaaccgctacattgaggaacagtttgaagaagtggtaactcaggtacgaagcggtgtgccgttatctcaggcactgcacggtgtggacggatttcagaaaaaactggcaagtacggttcagatcggtgaggaaagtggtcgtctggatctgatgctggattctatcgcatcttctctggaagatgaggcagaacaggcaaccaagcggatcgtaacgctgctggagccgattctgatcgtttttatggcagtgattgttggatttattatgattgcagttatgttaccgatttatcaatcctatgcatcgattgagaattcttaaaggagtaaacgtaaatgagtgatacagtaatagtagtacaggatgagtgcattctggtcgctgtcggcaaagcgggcagaccaccgaaagtacagaaagtagagcggatcccgttaaatggttttggcgatccaatcgaactttggaaagaagcactgactgaatatacgaaaacgcatgatctgggaccggtgaagctggtacttccttctgcttatgcatctggtcgtgtgacgcagatcccatatgcaacaggaaaagaactggttcagatggcagagaaagtaatggaggaagccggtagtaatgcgttggcagattatggtgtgatctccgcgaaccgaaaacagggaattacactttgctgtggaagtgcggaagaagcggatatttccaagattatgggattttgccaggaaatcggtctggatgtgaaggagatcagtgtctatgtggagagttatctgcgtgtcatcgcacaccagaaagcactgagccagaaaacggcaatctatctgatctttgaggaaaacagtgttacaagtctgttatatcgaaacggtgtgtatctgtattccacgaaaagccgtattttcagcgagcatggtacactggattttggaacagagatcgtgcggcacatttccggtattttacagttctatacgacaacgaattcagaaacaccgatcacggatgtttattatgcggcatgtgatccggatgatttcgaggtcagtatggaaggaattcatgcaatgcagcttgaagcacagccgttaaagatcgacctgtctttccatgcggcagagagagcggaggattggcttgcctgcattggtgcactgacgaaggaaaaattaaaggagatcaatctgtaccgcagttggagtgaaaataatgagaccggtatggtaaaatccaaaagtatggtaaaacagattctgtatccggcagcggtgcttggaatctgtgcagtgatctatgccggtgtgatggtctggaatatggcggaatcccacaaagtatctgagattgaggactggatcaatgatccgcaggtgcaggaagattatagtcaggcgcaggcgaagcagaagcagagcagtcagctgagttttgatctgaatcaggtaaatcagatgaaagaaaatctggcaacttatccggatctgacggaagatatgatcgcaaagattgaggatgtcggtggaaacgatatgtctgtccgcattgaatctctggatatgggaaccggaacactgacgtttcatgcagtaagttataaagttattgatattccaacttatattcagaaactggatgataccggattgtttgaatccgtaaattacagcggatataattttgaagataatgagtattccctgatgctgacctgtgtgttgaaggcagcagagaccggaggtgatcagtaatgaaattggagatggatttaaaaccgaaggatattgtactcttaaaggtactgggatgtgtactgatcgcgtttgtgatgatccgttttctgatcttcccgggaattgaaaaacatatggatctggtagatcagcgggatgaagtcgtggcagaacaggaagatatgcaggcactgatcgaccgaatggatacatttgatgccattattgcaaatcagcagtcttcgttaaaaagtgcgcaggagggctattatgacctgttggaaaaccgggaggtggatgaactgatcaccggaatcgtgttaaatcacaacctgtttccggtttatctgaatattacagatacgacagcgggtgttccggaagcttatttgtatgccccacaggcagcgacgggcaatacttcgacggcagacagttccgcagacacttcgacggatgcaacacaagattccgctgctgctgacagcacagacagcagtgattccaaggattctgcgacagagagcagtgcagctgtttctgcaccatatgtgaacacgacgtctgtggatgtgacaatccgtggaagcgaagcagagatcaaagcttttttagatgatattgcaagaaattatcctggtattcaggtacgtacatttaatatgcaggaaaatgattatgtgaatacaacaatgcagactgtttccgagatgagttgtagctgcacgctggcagtatatgtctgcggagagcaacagactgcacagactgaaggagcgagtaattaagtgaaaacaacaaatctgagaattggagatattctggttgaaaagggatatgttaccccggatcagatgaatcaggcacttgcctggcagaaagagcacagggataaacgtgtcggacagatcctgatggagttgggatttgtgtcagagtcacaggtgctggatgctcttgccagcagactgcatctgaatattgtagatgtggctcagctttctgtagatttgcaggcggtaggcaaggtcagcagagaagtctgtgaaaagaatctgatccttccggtgagtcttcagggacacaatatggagatcgtgactaatgatccgctgaactattttgccctggaggaagtaagacagcagaccggttgccatcttgagatctccctgagcgaagaagaaccactgcgaaaagctatttcttattattttgcggaggtcaatgcgcggaaggcagcaacacaggcgaatgtggattttgcagtagcagcgcaggatgaaatcgaaatcgaagatctggaatccggggatgatgaagcaccgatcatcagattgttgaacagtctgattgaacgagccatcaaaacggaagccagtgatattcatatcgaaccatttgagacggaaacaaaagtacgaatgcgtattgatggtgtgatcatggagtatgttacgatccagagaaacattcatgcaccgctgattgcacgtatcaagattttgtctaatctggatattgcggaaaaacgtattccacaggacggacattttcgtgttacgttagagggcggaagtgtcaatatccgtgtatctattttgccaacagtatttggtgaaaaggcggttctgcgtattatggcagcaaccacgcatatggatcatgcggatcattttggtatggatgactacagttataaccagtttgcaccgatgctgaaccatccgaatggaattatttatattaccggaccgaccggaagtggaaaatcgaccacgctgtatatggtgttggattatctctccggcagaaatgtcaatatttctaccattgaagatccggtggagaagaatcttccgggaatcaatcagacgcaggtaaatccggttgcgggtctgacgtttgatgtgggactgcgtgccctgatgcgtcaggatccggatattatcatggttggagagacccgtgacggcgagactgccggtacttcggtacgtgcggcgattaccggtcatgtggttttgagtacattacatacaaatgatgcggtttccagtattgtccgtctggaagatatgggcgttgagacgtatctggttgccaattctctggtgggactggtggcacagcgtctgatgcgtaaagtgtgtccgaattgcagtacagaaatgccaacgacggagcaggagcgtaattttctgggagaagatatcaaaacaatacgtcgtggcgcaggctgttcacgttgtaatcataccggttacagtggacgaatcgcggtgcatgaaatcgtggcaatcgataatcagatccgcagaatgatcatcaatcacagtccggtggaagaaatctcagcgtatgccagagagcatcagcatatgcgtaccttaaaagaaagcggtttgattcttgtaaaagagggaaagacaacaccggaagaattgttaaagatcagttatgaataagttttggaaaaactaaatctgacaaacaaattttgaaaagtaacaggaagaaaagagaaatattttggcaaggaaatgcaaggtgtttcaggcagaaagagaggtctgacaaagtggcagaagaagcgttaagacaggcggcggatgcgatcatccgggaagcccgtgagcgaaaagcatcagatattcatatttcagaagggatgccgatttggtatcgtgtcaacggacgtctgcttccggcgcagacacagatgtcggcggaggagattcgcggtatgctgtatgcgatcatgccgaagcgtcatgccgaaaaatttgaaaaaggatttgatgcagatttttcctttcagacttccgatggacatcgccagagggtaaatgtgttccgccagcaaaaaaagatggcaggtacgatccgtctgctgaatgcatccattccgacactggaagaactgaagatgccgacggtgctctatgagatggcaaaagcaccccgtggtctgatccttgttaccgggccgacgggaagtggaaaatcaaccacactggcggcgatgatcgaatatatgaaccagaacagtgaccgccacatcattacgattgaagatccgatcgagtatgtgtatgaaaccaaaaagtcgttgatccaccagcgggaagttggcgaagatgtgggagattttgcatcggctctgcgaagtgccctgcgtgaagatccggatgtgatcttagtgggtgagatgcgtgactatgaaacgattcaggcagctttacttgcggcggaaacaggacatctggtactgtctactctgcatacaacaggcgcggcacagacggtagagcgagtgatcgatgcctgcccgacgggaggtcaaaatcaggtcagagtccagcttgcaggtacgttaaaaggcattgtcagtcagtgcctgatcccgtgtggcggcggtgtgacccgtgtggcaggtacggaacttctggtagcaacggatgcgatcctgaacctgatccgggaaggaaagacacatcagatttccaatatgatgcagtcgggaacagcacttggcatgcatactctgaatatggatctggtacggttgatgcagcagggatatattaccagagaagatgcagcaatttatacgaataataaagcagagctggaagcgactttgcgataaaacaaaatacgtctgggtttgaaaagagttatgaaaatcttatgaattctaagcatttcataaactttttgggaaatacctagacgtattttctttgctgtggtatgatgttaggcgaaatatcggaggtagaaaatgtcagattttgataagaagaaaccaaatataaaaaacgatacagatacagatgaaatttatgagatcccggacatcgtgaccggaggaagcgaacataaagaagcaaaagaaccgaaaataaaaaaagaaaaaagagtgaaaccaatgaagcagaccaattcggaaaataataaagaaaaacataacaaagagaataaaaaacatacatttgaaatgaaaaataaaaagcatagtaagaaagccgcacaggatgatattatggaagatcttgagtttatctctgaggaatccgtaaaggataagtcccgtatggcagagggaaaaccaatctcccatgaatttgtttccaaaaagaaaaccctgcgacgcagcgtggacgagatggaggcaaaaaaggaaaaatccgtggcattcatgcgtagaaatatagcatttgtcggcattgcctgtcttgtggtcgttgtggcgatctgtgcgatcgtgatcggcgtaaagagcatgaaagcaaagaaagcggcggcagagaaaaatcagacgctgtccacacaggaatatgaaaaagacggacatgcagagatcaatgagctgtttgtaaattactataaagcatatgcagctggtgataccgaagaaatggttggctatgcaaatccgattacggacatggaaaaaagttacatttccatgtatagccagtatattgagaagtttgacaatattatttgttatacaaaaaccggagcagatgagaattcctacattgtttccgttgcttatgatctgaaatacaaaaatgtagagacagcggcaccgggactggatttcttctatgtccgtaccaatgacaaagggcaggtatacattgataatacttacagttctttcaatttgagctatcaggaaaatccgctggatgatacgatccgtcagctgatcaacgactatgaggcgggtgaggacgtaactgcattacaggcaaacgttcagacacgttatgaggaagcaattgcacaggatgcggatttgaaaaatatgatcgaaacaacgattgtcaatgcaatcaacgaatggaaaactgcacaggatcagcaggcacagcagaaaacacaggaagctgcaaatcaggtagccgcagatcaacagcagcaagaccagcagcaggcagcagatcaacagcaacagcaggatcagcagcagacaccgacggagacagagcagaaagcatgggtttatgcaaccgaaacaatgaacatccgtcaggagccgaatgagcagtctgcggtactggcatctgcattgcaggggtctgagctgagacagcttgccgttacttcggatggatggagcaaggttaagaccggtgatatcgtcggatatgtgaaaacagaatatgtaacgacacagcatccgtaaaaggaagacgcaagcggcgtataaagataagaaaaaggggacagccagtctgttcccttttgatgtctgtctggggtgtgcggcttcgataaaaataaaatagacagaacatttgttctggcgtataatgagatacatattttaaacgggagtggcaatactaaccaaaaacggaggtattgtcatgacacaaaaagacgaagacgatctgttacatgagatatgcagaaatgccagcatgggtgtggaagcgattcacgaagtactaaaggatatttatgatgaggagtttgcatatgaattaaatgtgcaggcagataaaatgcagcagtttggcagaaaggcaggaatgcggctgcgggagaacggagaagaaccggcagaaccgaaaccaatctctacggcgatgctgaaaacggcgatccgtatgaaaacaatggtgcagaataagactggagatatggcagatctgatgtataagggaaatgaccgtggagtcagggaattaaaacatgcgatccacaaatataaagatgccggaatttatgccacagagctggcaaaggaaatgatagattttgaggaggagaatcttcaaaagatgcgttcttatctggatgaggaatgaatggaaaacaatcgaagaagcataggaaaattacaatgtttgaaagattacgttcaagtcgaacgcacgtgagacttg

SEQ ID NO: 13301 - DNA, 145 bp, Unknown
  gut microbiota DNA sequence
cgagaatcaggtgatattcctgttcgtggttctggtaattatgcatctgatgagcagaaggaaattgcccgtctcagacgtgaattacgtgatgcccaagatgcacttgatgtgttaaaaaaagcaatcaacattctgggaaaat

SEQ ID NO: 13302 - DNA, 3846 bp, Unknown
  gut microbiota DNA sequence
tatcttcctatatttgagacagatttgttaagtacaataaattatattacaaacgttttgaaaaatgaaagtgcagcacttcgcttagtggatgatatagaaacttccatattaaaaagactagaaaatcctcttgcctttgaaccgtatcgttctgcaaaaaaagagggattatccttattataggatttatgtgaggaattatgttgtatactatgtagttattggagatgttatggaagtacgacgcctgatatatggtgcgcgtgacataaatcgtcatttatagcagtatactacggatatagtttcacatggtttagtggcaatattcaaaaggaaaatgtattacatctcctgcatgaaaaatatcgtaggtgtttttcgtgcaggaggtatttttattcttcagctaaagatttatccgtattgtgggtatcccatgtgccagtttcagtaccccaaaggaataataaaatcaccttctgacttagtagctgactgctcaatagaaatacaatccgacaaatcaacaatatgattctgatctgtaattccaaaaatacgataggatccatctgcaataattccggtttttcgggtggagaatggaatttttgtcaattcgtttgtttggcagtgttaaagcagatggatattgtagaagatgagggcaaagtgaaactgacggcgcatggaaaagattctttattccgaaaagctgatgaagctggaatatgagacaaaatcggatgtatttgttccggcaagaagacagagggattattatgaaataccggcaaatgcgctgcagtatacttatcataagccggaacgattgctgatcggaagtgtgaagctgaaaatgtatgcgccgcttgcaaataagcagctgcgtgtaaagacggcgattctcagtattctgatgaatgggttctggtaaaagtgaagaaataattaaagagtaattgtaatgtaagtaaaggaattttcaaaagatttttcttgctaagatgtaaattatcttgttataatataagcataaaaagaaggttcttacatataataaaaagggaatcttggtataaaatatggtgtcactccgctattgacaaatacatagccagatagtatgattcaatcaatgagatagggttttcgcaacgtaaaaaggcttagaaaaagagaggaaacacgtatgaaaatcaaaaatgtcaaagatgtaaacgtatttttaggagttgttaatgagtgtactggagatgtaatcttaacatcagagtatggtgataaatacaatctgaaatctacattatcacagtatattgcaattgcagcacttcttggtcagcacggagaggaacttgagttatggtgttctaaccgtgaggacgaagcaaaattcctgcatatgttccaggataacccggagatgatgtaattactccttttcgttggaaaggtttccaattttgtgagtggagaagcattacagatttatccaacaaagaatgaaaacgaaataaaaataagggcagacaaaacggtacgttccaagtaaggagcgtaccgttttgtttgtgatttatgaaacatcgtcattgttttgcggaaagaacagcattgcagaggcggtaaaaattccattttcatattcaaataaaattgttccattatatttttctactgcctgagtgacattatgcagtccccatccatgaaaagatgatttgcgtgtttttagtggaagtccatcatccgtaaatttgatttctttggatggattggaaatttcgatcaacacaaatttcttaatgctctggatacggatttttaatggagcagtctgttccgggagtttaccgacagcttcaatggcgttatccagtaagtttgccagtatcgtacaaaggtcggcggcttcgattccggttttatccggaaaatcggtttgaatctcatagtggatgtttcgattttccatgagctgtattttattgtttaatacggcatctactacatcatcgccggtccagtgggttttctttaaaatctggacgggtttctgaatcgcggcgatatacgttttcgcttccggtatatttccatcgtccagcaaatgatccagagcaatcaggtggttgttcagatcatgatataatcttgcattctggctgtatacttcgtttaggttctgatatttttcttccagaagatgtttactcaacgcttccttttccagtaaatgctgtctgtttcgcaggtcaatttcaaagagcagaacggtaaacagcagcagtaaaaaagcgatgaggatcacccagaactttggagcctcaaaatagttgctgaatgttttatgcatcaggtagatcataacaaaacatccaacaacagtagcgataagcagtttccagactttcttttttccatcactcatgcgacggatgattgcagctgtaatcaggacaagtgcaagttcacatccttttgtaatcagagaaaatgcaatcgttgtccggtcaggataggaatgaagaaccgaaaggaaccttgctccgtgacgtgaaaagttcaacatcattgtgatataaaaaagttcaatacatcccgccatcagcacataaaaggcggatagaaaaattaaaacaaaaaacttcttgcgaactaaaatgcatccgccgataaaaagaatcaggatgtacagcaaaacggaaagcatcgtatagagcagatagtcattgatctgtatataaaatggtgccgcaatgcaggaaataatgaccgcatatcggtatttgaacgtacgataaaccgcatgcagcaatataaaaaatataaacactttcagtatggcaaagccataatcggatatcatgaagaatgttgtcataaagaattcctccataatttttgcagcagtaatttgagttccttgatacgtgcaagactggcaggaagaaattcaccgttatccaattcaatcgtcgtgtcctgaatggagacgatatggatcagatttacgatgatgcctctgtcagcaaaaacaaaatcagaactgttcagttcttccataaccggatttaaacttttgcgctcttttacttcggtctggtttgttaaatgaaaaacactgtttttcccttcgcgggatatgtacaggatgtctttcagcaataattttcgatacatgcgtgtattggagagcagatagtactggtcagtctgcatatgaagaatccgaaaggcatctttgagggctgtcggcagcttctccgggagcatttctttgtcaatgtagcggaatgcggacagctcaaaggcatccagtgcgtattttgtataagcggtaatgaagatgatcagcgcaccgggcagatgtgtccgaatcgttgcggctaattccataccgttcatatgcggcatttcaatgtctgtcaaaatcaggtcaaaaaagtgaccttctttgatgtcataactcaggttttcactcttgctgtacaatgtgatatctgcaacttcctgattggattgtaatatagtagttactgcctgattcagatgttgcagtgttacttctgaatcgtcgcagattgcgatttgaatcactgataaaacctcccaaaaacaataaattcaagtcgaacaagtgtgaattctggtatataaatccggtctgtataaattagtatgttttccttagaatcattgtgtaattacttattaaggataacggaaaaagaggttgatgacaaccccagattttagaatggatttatctcagtctgagttgagactcccacttctgcaagtggtgagtagtaacaagtatttctcagtgggagt

SEQ ID NO: 13303 - DNA, 5919 bp, Unknown
  gut microbiota DNA sequence
atctagcggtcacttacagatataccgttttaacatgcgcaacgatattctgatggtgttaaatgataacgttttttaaacaatctgcaaaaatagtcgacattacggaatccactttcataggcgatggtttttacttttttattcgtatttttcaatagccaagaagctgcctgcagtctatatcctatcaaataactgaccggtgtaatatgtaaaaatcgttgaaacaaattaagcgcagtacttttgctgattcctatatgtgaggctatttcatccagtgacagctcatgattatagttttcatgtatatattgcatcatcaactgtactcttttctgtgcagtctcgtcaactgtttgcattttttctttatccaataactttacattttcgtaaaaaatcagccataaatcctgcaacaaggacaacgtggaaagctcccttattttctcattctcctgtgttttcattatttttatcatgatttgtataatccttgcctgccatggttcagcaatctgaaaacactgaaaagacatattcgatgaaatgattggtaaaatatattttttataaaccaaactattctctggtgcaataaattcaggcatacatacaaaattaggaatgacaccacctgatgatgcataaaaccgatgcaatattttagaattgataaaaattgcatctccttctgacaatataatctgtttttcacctattccacatataatttgtccagactcaacatataaaaactcaaattctctgtgccagtgccattcaatacaatgaaaatcaaataactccagatcatcataataatactgaaatggataatcactggttccgtgctgcttgatttccataaagtcctcgtctgtaagtattttattataatccatctccatatcacattctttccttttacgatattatacagtattctggtgatttaattcaatgcatatgtttattgtttgctatataatcaaataaaaaaaggaaaagaggtattcgtatgatttttaaatggatgaatgaaagtgagatcagcattgaaggagacagaattgaaataaccgcaccaccaaaaacagactttttttgtggcagcattgacgaatgtgaagaaggtattttgccagaatcactttgtaatgccccatattattatactgaaattaatggagactttgttcttaaagtaaaagtatcccatgattttaaagaaatctatgattctgcttctgtaatggtaatggcagatgagagtcattgggcaaaatgttgttttgaactgacagattttggaacccatgcagctgtaagtgttgttaccaaaggcgattctgatgatgcaaacggctgtaacattgaaagcaattctgcctggcttcaggtatgcagagtaggaaataattttgcattccattattcagcagatggtataaacttttacatgatgagatatttccatttgccgtctaaaccaatcatcaaagtcggattactagctcaggctccaagcgggaatggtggaaaacgtatttatgaacatctttctattgaacataaaactgttaaaaatattaggagtggaaaatagaaagtgaatgtagtaaagaaaaatgactatcataagacaaaaattgcctgttatatgggctttatcacgcaggctattgcggcaaactttgcaccgcttctttttttgaaatttcacaatgactatcatatttctctcggtaatattgctttgatatccacgttcttctttttcacacagcttctggttgatctgttctgtgccaaatttgtagattatatcggatatcgtatttgcgttgttgcatcagaaatatttgcttcacttggtctggttggactggcatttttacctgatcttttacctgatcctttcattggaattatatgcagtgtcgttgtttatgctatcggaagtggcttaatcgaagttctttgcagccctattattgaagcctgtccatttgaaaacaaagaagcaacgatgagcctgctccattccttttactgttggggagctgttggaacaattttgatttccagcttgttttttctgatattcggcataaacagctggaaatggcttgccgtgatatgggcactgattcctgctgttaacacttataatttcatgacctgtccgattgagcatctggttgataatggcactgggatgggaattaaaagtctatttgccaaaccttttttctgggttgtgatatgtctgatggtatgttctggagcttctgaacttgcaatggctcaatgggcatctgcttatgccgaatctgcactgggattgtcaaaagcactgggagatttagcaggtccatgtatgtttgcagtcaccatgggcatcagccgcataatttttgggaaatatggaaaacagctggatttaatgaagtttatgggtggttccggcatattatgtgttatctgctatcttctttctgccttgtcatctaattcgattatcggacttatcggttgtatagtatgtggattttcagttggaattatgtggccgggaacgatcagtatttcctcaaaaacgtttccaaaaggggggacagctatgttctctctccttgccatggcaggagatttaggcggcagtatcgggcctggaattgttggccgtatcactcagaacgccgggaataatattaggagcggcatgagatgcgggcttatttttccagtaattctattattcatgctctttcttctatatcgaaaaaatcagcaatcgcaaaaatagcacccgcgacagcacacacgctgtcacaggtactatttatcccactatattttcttagaaattctttctactgaataaacatcgcatccccgaaggagaaaaatctgtatccttccttcactgcttcctcataagccgccagcacatgctctcttcctgcaagtgcagaaaccagcatcagcaacgttgactccggcaaatggaagtttgtgatcagacaatccagcactttgaattgatagcccggatagatgaatatctccgtccaaccgctgctttctctcagcataccgttttcgtctgctgcagactcaatggtacggcagcttgtagttccgacgcagattacacgatgaccgtttttcttcgcattgttgatcttgtcagcggcttcctgtgttaccatatagaattctgaatgcatatgatgatccagaatattgtccacttttaccggacggaacgtaccaagtccgacatgcagtgttacctctgcaatatcaacgcccatatcctttacctgctgaagcagttccggtgtaaaatgcagccctgcagtcggagctgctgcagaaccgtcatattttgcataaacagtctgataacggttcttgtcctttaactgatgtgtgatatatggcggtaacggcatctgacctaactgatccagaatttcttcaaaaattccttcataagtaaatttgatcagacggttgccatcttccacgatatcaatcacttcaccgactaaaagtccaccaccaaaaataatttttgtgccgacttttgcctttttacccggttttaccagcgtttcccagacatcgttttccttgcgttttagcaacagaatttcaatttttgcctgagtcccctctttttcaccaaacagacgggccggaattacttttgtattgtttaagacaaggcagtcacctggtttcaggaattctgtgatttcccggaatacatgatgagaatactcgccagtctctttatccaggaccagaagtctggaggatgaacgatcctccagcgggtcctgcgcaatctgctcctgtggcagatcaaaataataatctgttaccttcatttcgttttcattcaatacagacaccaactttctactggcgcaactcgataccaagacgctccagaccgttcattatcttcttcatggcagcagtgatatctgcttcctctaacgtacggtcttttgcacggaaggtcagtttataagccagagatttgaatcctgctttaatctgtgcgccctcataaatatcaaataattcataagactcaagaatcttgccgcctctctcgtcaaataccttctcaatatcgcctgcaagtacatgtttcggaacaaccatactgaggtcgcggctgactgccgggtattttgcaatgccttcgtatttgcggtcaaaagttgcacgggaaacgatttccggcatatcaatgacagcaacgtatacgcgatctttaatggagtaatttgctgcaacagtcggatgaacctcaccgaggtagccgatcacctgaccatcataaataacatttgcctgacgtccaggatgtaagaaggacaattccgactccggatcatactccggtttcagattcatacctactttatacagaaactcctcaataacacctttcatggtatagaaatcgccatcaccgtagaatcccagtgtaaactgcatgcgctcttccggaagttctgtaacaggctcctgttttggcagataaatatttcctaattcatacagtcgaacatttttgtttctacgattgaagttggtagaaagagatgtcagcattccatttaaagaaactgtacgcataatactgaagtcctctccaagcggattggaaatagttacggtattacgcagctgactgtctgccggaagtaataatttatcaaataccttcggactctcaaaggagtatgtcattccctgtgaaaatccgcagaactgggcaacttctcttgccacttcctctacacgaagtttaaaggacagtttacctgttgtggattctccggatggaagtgttgtcgggatattgtcatatccgtagaaacgtgctacttcctctgcgatatctgcatcacggagcaaatcctgtctccaggatggaacgatgacttcctgtgtctcctcatcaaaaccaaggtcgatttttttgaaatatccgatcattgtctctgcagaaatatcagttccgagcagaccattgatccaatccggatcaaatgcgattcttctgcctgtcatttctttctggtatacatcaacgacaccgccaacgacttcacctgcgccaagttcttcgatgagctggcaggcacggttcatagcctcgatggcattgttcggatccagacctttttcaaatttggaagaggcgtcggtacgaagacctacttttttgctggacagacggatgtttgttccatcgaagcatgctgcctcaaataacatcgtctgtacattatctgtgatcatggagttttcgccacccatgatacctgcaagtccaacggctttctcaccgtcacagatcatcagaatgctgtcatctaaggtacgctcctgaccatctaatgtcacgaatttctcaccttttgctgcacggcgaacacggatctcatgacctgcaatcgtatccagatcatatgcatgcatcggctgaccaaactcttccatcacgtagtttgtgatatctacgatgttgttgatcggacggataccgtgggaaaccagtctgtgctgcatccacttcggtgatggagcaagtttgatattttttactacacgtgcagtataacgcgggcaaaggtctgcatcctcgacagatactttgatgtagtcgtttacgtcctctgaatttccagtctctgtcactaccggaggaacaaactcttttccgaaagtagctgctgcctcacgggcaataccaagaatggagaaacagtctacacggttggatgtgatctcgtactctacaacgacatcgtctaatccaagataggtgactgcgctctcgccaaccggagcatcttccggtaagatgtaaagtcc

SEQ ID NO: 13304 - DNA, 25034 bp, Unknown
  gut microbiota DNA sequence
atataagcaggagtgaaagtccgaaaataatacaagcagacgtcttagtctgcggtattcttttcggactttcactccttataaaacaaacgttattttacaatatcggctaatggacggattttaatatcattttcggtaagtgccttacggattttttctacgaaaagcagtgctttttcaccatctccgtgtacgcacacggaatctgtctgaatcggaatatcctttccggtcacagcagtaacaacgccttcttttaccatacgaatgacgcgggcaattgcctcatcctcatctttgatcagcgcgccttccttacggcggttgaccagtgtgccatcttcttcatagccacggtctgcaaatacttcgctggccgcttttaatccacagtctttggcagcgcggatcatttcacttccggataatcccatgacaatgatctcaggatcatagtcgcggatcgcctcacagatggccatagacagctcataatccttggctgccatgttgtataaggctccatgtggtttgacgtgctgcaggcgcattccgtttgcctgacacatgccgccaagggcactgatctgatacagggtgtaagcttttgcttctgccggggagattgccatatttctgcgtccaaatcccatgagatccggaagtcccggatgtgcaccaatcttgatgcctgcctctttggtgcgggcaatggattccagtattacgacaggatcggatgcatgataaccgcaggcaatgtttgcagaagaaataagaggaatgattttttcatccattccgatggtatagcggccgaaactttcgccaaggtcactgtttaagtctacctgatacatggtaaagacctctctttctgatttgaaaatttattagtccagacgtaaaatccgttcaataaagccggtatcggcttttccttcgcagaactctggatttttcaaaatacgatactgaaaatcaaggttggtttccacacccatgattaccatttcgtccagcgcggagcgcattttctgcaatgctgcatcacgattcggtgcatgaacaatgacttttgcaatcatggaatcgtattcggatggaattcggtagccagtgtaaagggcagtatctacgcggacgccgtttccagatggcagatgcagatgtttgaccacacccggacttggcataaagtttttctcagggatttccgcattgatacgacactcaatggcatgaccacgcggagtgacatccttctgggtaaaacttaacggctcacccatagccacgcgaatctgctcaataatgaggtctgtgccggtgaccatttctgtgacaccgtgctctacctgaatacgggtattcatttccatgaaatagtaagtgccttttggatctacgataaattcaacggttccggcgtttgtataatttacagcttttgctgcaagaatcgcgtcatgattcatagaagcacgcattttttccgtgatggcaggagacggggactcctcaatcagcttttggtgatttcgctgtacggagcagtcacgctcgccaagagcaaccacatttccgaagttatctgccatgatctgaatctctacgtggcgtggattttcaatgaatttttcaatatacatggtgtcatcgccaaaggaattggctgattcacgctgtgccatattgaaattaaattcgaattcatctttggattttgccacacgcataccttttccaccgccgccggaggaagccttgatcataaccgggtaaccgatctcatcggcaaatttttcaccagtttctgcatcgtagacaggctcttttgtgcctggaacgacaggaacgttggcatccatcattgttttgcgggcgtgggatttgtttcccatgctgttgatgacatcggcagtcggtccgataaaggtgataccatactcgtcacagagacggacaaaatctgcattttcggataaaaatccgaagcccggatgaatggcatcagcgccgacattgcgggcagctgtgatgatgcgctccatattcaggtaattgttgcgggcagggccttctccgatgcagacacgctgatctgccagctgtacgtgaagactgtttttatcttctttggagtaaacggcgacgctgcggatgcccatgttgcggcaggcgcggataatgcggaccgcgatttctccacgatttgcgattaatattttgtgaaacatcagcaggcctccttagtcatccagtttttttaccttaaacagtggctggccatattcgatcttctgctcattgctggccagaacggcttcgatttcacagtcaaaatcactttcaatctcattcatcagtttcattgcttccagaatgcatacggtctgtccggctttgactctgtcaccgacttttacgaaggcttttgcttccggagacggagcggaatagaaggtgccgacgatcggggaggtgatgtaggtttcgtcctctgcttcttcttcaatcggggcagcaggagcagtctgtgcaacggtgactgctgcttctcccggaacacccatggttccgcggcggctcattttgatctttgtatcgccttcctgaatggaaaactccagcatggaggaattttcgataatctgtacaagtttttcaatctgttgtaaatccatgatagtttgttactcctttgatgttcaataaaaaggattctataggaagatcctgtgaatgtattttcaatctgttgctacagaatcctgtaatagttcagtagctagtcctgaaacagttttgataaacgttttgccacaagtctgcagtccagaacttctttacacggctgataaatttgtttgcggaattcctgcagttcatgaagttcatcctgcatgagctgctgggcttcttctacggtaactgcctgaaaacgtaccttgtggtctgtttttcgctgaaccagtttcggaatgtccacggaaatgacagtggcaatttttgcatatccgccggtggtttgacggtcggaaagcagaatgatcggttttccgtggcttggcacctgaacagatccgaaggcaattccgtctgaaatgatatcggaagtggtcttgtatgcgatgaacggtccttccagacggcatcccatacggtcaaattcactggttacggtatattcggattccagaaatgtctttctgcctgctgcggtaaatgctttatcctgtggtcccataataacacgcaaggtcacttcatcctgatcaaattcatccagatccagagtacgggacaagtaatatggtaaatatctgcgtttgatacggaaaccaacataatccccatccatcagacggcgtcctttgtatccgccaatggagcatttgatgttggtagaacggcttcccataaccaccggaatgtccagataactggaaaaagcgatgtagccacggctgccggttctggcgccgcggaaggataagatatcaccacggtgcatatagactgcggtatagtttttgatgggtttgccgtttacctgtggctggaaatcgccgccggtgatggcaataatggtttcggaagtaaattccagtgtcggtcccatcagggtaaattcaaggactgcttcgttttccggattgtctaaaagcaggtttgcaattttaaaggagcgcacatccatgacaccggacacaccgaagccctggctctgatagccggttcttccaagatcctgtacagttgtgagcatgccgccttttaatacacgaacgcccatgggttacacctccttttgatgaatcgtgcaggtataagtacctttttccacttcatctttgattgctgtaaaatcagattcgctgaccgggacaaaacggatgtaatcgccggcttcaaaaagaatcggaacttcacggttcggatcatacgtttttaccggagtcagtcccagtaactgccatcctcccggtgaatctaacggatagataccggtctgggaaccgccgatgccgacgcttccggctgggattttgatacgcggatttgccagacgcggagtgtggatgcgttcatccaggccgccaagataagaaaatcccggcaaaaatccaagcatgtagatcagatagtcactggaagagtgaatatcaatgacttcctgcggggtaaggtttgcgtgttttgcaatgttttccagatccgggccgtattcgccgccgtagcacaccggaatttcaaaaatacgggaagaagatacttttttgctgacttccagttttaataatttttccagacggcgttttaatttgcggtagtcgataacgcgcggatcatagttgatgagaaggcttgtgaatgcaggaatcacatctgtgacaccttccacatgctgttctctcatcagatgcacaaacgcagtgatctgtgcattgatttccggagaaatctcctgcccaaactgaatgagcagggaggaatctccggcggtaagaatttttgtgtctttcataattgatcatgctccattatgcaaaaagtgttgcaaggtttccgagggatgtgatgccaaggtatgcggagatgacaacaacaacgataccaagaatcagcagccaggtcggatgatggtaatcctcacccatgatagtcttctttttggaagctatcaggcatacaccaagggtaattggaaggatcagtccgtttaaagctcctgccagaacaagcagagtagcaggctgaccgatcagtgccataacgacggtgctgaggatgatgaatccaacgataaaccatttttcatttttttcgataaatttactgaatgtcttcaggaaagatacggaagtgtacgcgcagcctacgatagaggtgatggcagcacacagaagtaccagtccaaagaagcggtatccgatctgacttgcaccgatcttgaatgcatcagcggcagggttggacggatccagtgtatgtgcaccggaagttgcagtagcaacaacgacgccaaggatggcgaggaataacagtacacggacgatggttgcgataccaagtcccataacagaacttttcttaatttcaccaaggttttcttttttcgtgatacctgcatcgatcagacgatgtgcaccggcaaaggtgatatatccgccaacggttccgccaagcagtgtcaggatggcagggaaagtgtcgctcattgctgcagatggtgcaacggtttcttttaaggcatagccaactggtgggcggacaataaggatcacaacgaaaataacggcgatcataagtccaccaagtacttttgtcagggtatccatggcttttaatgcattcttagataagaaaacaacgactgcaatggcacctgcaaggaaatatccaactgttgtcggaatgccgagtaaggtgttaaaaccaagggctccgccgccgacgttaccgatgttaaatacaagaccaccggctacgaccaggaatgctaccacataaccaagtcctggaagcactttgtttgcaacgtcttgtccacgcataccggatacgcagagtacacgccatacgtttaactgtacaatggcagccagtacgatggaaattaaaataacaaagccgaaacttccatgtaggctgtccgtgaattttccggtctgggtcaaaaatcccggaccaatggcggaagtcgccataaggaatgcggcaccgatcagggcaccagcgttttttttctgattgtttttgttcatacaacgctccttcacaaatttaatatctatattattatacataattataagaagaagtacaaatttttttgcttttatgtattgggagtgtccggtccgagagtcagaaaagaatgtcgcagactaagacgtctgctctcattattttctgactctcggacttacgtttacgaagttggcaattatcgtatgaaaaagacttataattaacaaactgacaagaaatggaaaattaaaaaagtgcggcaatgttgtccggaactcaatctggaagagggagattttctgacggaactggtctgtgaaaaggagctgttgcagcagaatacagaagaacagtcttctctggaactgactttggaaggattaaatcataccgtttcggcaatttttcatttatataaagaagcaaacaaaggaaatacagggtacggggcttggcatggcaatcacgaaaagcctgacagatgcaatgggtggaaatatccggggagacagtacgcttggaaaaggcagtcgtttttgtgttgagattccgtttgcggtatctgctgctgagatgtgcaacgctgtctggatgcggggatgaatgcccatattgcaaaaccggtggattttgataaattgaaggaaatattgcaaaatttgtagtagtaacttgagtctggtggcaataagtgttacaatgaacccagaaaataacatattgatttgcatgagattatgagctgagcaaaaaggagaccatgaagatggtttatttttgttcggctctttttaatttcaccaggttcaagcagatttttagaaaagtgtataaataagtatttatgaatgaaaaaatatttgatgagttggatctgaaggaagcgaaactgagaaaaggagagcgattttatgtatgatgtaatgatcattggggcaggtgtcaccggaagtgccattgcccgggagctgatgcgaaagaaacgaaacattgcggtactggagcgctgcagcgatatctgtgaaggtaccagcaaggcaaacagcggtatcgtgcatgcgggatttgatgcgacaccgggaaccctaaaagcgaaaatgaacgtacagggaagccggatgatggaagcactttcaaaggaactggatttttcctataaacgaaacggttcgctggtactttgttttaatgaggcggacagaccaaagctggagctgcttctggaaaaggcagagaaaaatggtgtagaaggatgcgagattatttccggcgacgaagtgcggcagatggaaccgcaggtgtccgaacaggttgtggcagcactgtatgcaccggcaggcggcattgtatgtccgtttggattgacaatcgcactggcagaaaatgcatgtaccaacggcgcagagtttttgttaaatcaggaagtacagaaaattgtgaaaaaggacggatattatgagattcatacgcaggatcatgtgtataagacaaaactggtggtaaatgccgccggagtttacgcggacgttttccacaacatggtcagcgaacataaaattcagatcatcccacgaaaaggcgagtattgcctgctggataaaaaggttggagactttgtatcccatacgattttccagcttccgacaaagtatggaaaaggtgtgcttgtaacgccgactgtacatggcaatctgatgctgggaccgaccgcggtagacgaatcagataaggaaaatatcgcaaccacagcagaaggtctggaagatctgcagcagcgtgcgctacttagtacaccgaacctgccaaaacgtcagactatcacatcctttgccggtttgcgggcgcatacagagaaaaatgattttatcattgaggaagtggcagatgcgccgggctttatcgatgtggccgggattgaatctccgggactttccagtgcaccagccattggcgtttatgtggcagaattgattgaaaaactgcttccggcagaggataatttggagtttgtatctaccagaaaaggtgtggtctgcatggaagaactgactgtggaagaacgccatgcgatgattcagaaaaatccggcatacgcaaacgtcatctgccgttgtgagatggtgacagagggtgagattttagatgcaatccaccgcccattgggagcgacaacactggatggcgtaaaacgcagaacccgcgccggaatggggagatgtcaggcaggattttgttccccgaagaccgtggagattcttgcaagggaacttggatgcgacatcagtgaaattacgaaaaaaggcagaaattcaggattcctgaccggatatgataaggaggatctgtagcatgaaaacgaaaattgcgattatcggcggcggacctgcaggtctggcagcagcggttgcggcacgaaaggccggtgtgaaagatattttaatactggagcgtgatgagcagctgggcggaattttaaaccagtgtattcacaatggatttggactgcatacctttaaggaagaactgaccggaccggaatatgcggcacgttttattgcggaagtggaaaagatgcagatcccatatctgctgacaaccatggtggtggatatcagtccggataaaaaaattacctgcatgaaccgggagcaggggatgtttgtggtagaggcagaagccatcgttctggccatgggatgcagagagcgcccgcggggagccttaaatattccgggctatcgtccggcaggcatttattccgccggaacagcacagcgttacgttaatattgagggacggatgccgggcaaaaaagtggttattcttggttccggggacatcggattgatcatggcacgacgtatgacctttgaaggtgcaaaagtgcaggtggtggcagaactgatgccgtattccggcggcttgaaacgaaacattgtacagtgtctggatgattataatatcccattgaaactgagtcataccgtggtggatatcaaaggaaaagaccgggtagaggcagtgaccatcgcgcaggtggacgagaagttaaaaccaattccgggaacagaagaaacctacgaatgtgataccttactgttatcctgtggtctgattccggaaaatgagctttccggaaaattaggtgtggaattaagtccggtgacttccggaccggtagtcaatgagagccttgagacaaatattccgggtgtgtttgcatgtggaaatgtcctgcatgtgcatgatctggtggattatgtgtcagaggaagccggggcggcaggaacgttcgcggcagaatatgtgacacagcagtttgcggaagatgcaacagaaatcaatatttgcccggagggtggtgtgcgctatacggtgccgtcttccgttcatccgcatcggatgcaggacaaacagattgtacgcttccgggtcggaaatgtatacaaaaactgtgagctttgtgtttattttgacgatacctgtatcatgcgtttaaaaaagaaagttatgtcaccgggtgaaatggagcaggtgattttgcagaagaaaaaactgcaggaatatgagcatttatccaaaataacaattcgaatcgaacagggggaagcataatggaacgaaaagaactgatttgtatcggctgcccgctgggctgtaatctgacagtggaaatggatggcgtgcaggtgatatccgtaagtggaaatacctgcaaacgcggggatgattatgccagaaaagagctgacagatccaagaagaatcgtgacatccacggttccggtaatgggcggcaatctgccggtggtatcggtgaaaacggcatcggatattccaaaagggaaaatccgggaatgcctgatggcattaaaaggagtgacacttacagcaccggttcagattggggatgtgattgtgaaaaatgtggcagataccggtgtggatgtggttgcaaccaaagagatacagtgttcctgaaagcattgtttatggtcttaataaggggattttacgatgagaccagatgccgataatgtgaaaaaatctgctgttgaaagataggaatagatacgataatataaaaatatatatacagaagtgttttacataataatttactatgagagaacagcatcaggattgtatatcagatgggagccaatcccccatctgatatagcctccggcaggattacagaggtgcgcagttgaagtatgtcatgcaagtgcatgacgcgcacctcgcaacaagaatgccggagcattcttgaatatgaaaaatatgtataaataagagaactatgaggagaaaaaatcatggggaaaaaatatattatgtcattggatcagggaaccacaagctcccgctgtattttatttgatcatgaaggaaatatctgtggtatggcacagaaggaactgacacagatttatccgcagccgggctgggtggagcagaatccacgggaaatctggtccacacagttatctgtattggcggaagcgatcgcggttacgggtacaactccggaagatatcgaaggcatcggtatcacgaatcagcgtgagacaaccatcgtatggaaccgacacaccggtgtccctgtatacaatgcgattgtgtggcagtgccgcagaactgcggatcagatcgaacgtttgaaagaggaaaaatttgacgaactgatccgggaaagaaccggactgatcgcagatccttatttttctgcaagcaagatcgcatggattctggacaatgtagaaggcgccagagcgcaggcagaagccggtgatctgttatttggaaccgtggatacctggctgatctggaatctgaccggaggcacagtgcatgtgacggattattccaatgcatccagaacgatgctgtatgatattcataaatgctgctgggataaggagattctggcaaaatttaacattccgggaagtatgcttccggaggtaaaaccatccagttatatttatggacataccgatcctgcagtgaccggcggagagattccggtgtgcggagcagcgggagatcagcaggcagcattgtttggacagagctgttttgaaaaaggtgaaggaaaaattacatacggaaccggatgtttcctgttgatgaataccggaaaagagccgatcgcatcaaaaaatggtctgctgaccacgttggctgccagtgtcagcgatgaagtggaatacgcgctggaaggaagcgtatttgtggcaggcgcagcgatccagtggctgcgggatgaaatgcgtatgatcaaaactgcacgccagtcagaggaatacgcagacgaagtaccggactgcaaaggcgtttatgtggttcctgcttttaccggaatgggtgcgccgtactgggattcttatgcgagaggcacgatcgtaggcgtgaccagaggatgcaaaaaagaacattttatccgtgcaaccttggagtccattgcttatcaggcttatgatgtcattgcagcgatggaagaagatgccggagtcaaaatgacacatctcaaagtggatggcggagccagtgccaataatatgctgatgaaattccaggcagatattacaggcattcgtgcagagcgtccgaaatgtattgagacaacagcacttggcgcggcttatctggcaggactggctgtaggctattggagcagtaaagaagaaattcgcaaaaactggaatctgggacggacattcgagccgaccatggaagaagcagagcgtgtaaaactgttaaaaggatggcatcgtgcggtgcgttgtgcacttgcctggtctcaggatgaagactaaacgagtgaagcgcaaggggcatgtttggtacgaagaacaagaaagaaaaatagaataagcgattaagtaatttagaaagaactgcttttatgtgacgatgatacatagaagcagttctttttctgtaattgtaatcagtacaaccatgtaagtcatacagttgcaagaatgtgtgataacagcttccatggaatgaatgtcttacaactgttgcgcaaaattgcgcaaactaacagaaaatatgtgtaatttacagaaaacagaggaatgattttatgaaataagcaaattgacgataaaatgatatcaaagtaatatagatatatacaaaattaacagaaaaaatgggagatgagtaaagcaagtggggatacaaaaataacgattgagcaaattgcgcaagatttaggatgttccaagacaaccgtatcgagagctttatccggaaaaggccgggtggggaaagagatgcaaaagaaaatccttgcctattgtaaacgaatcggatatcagaaaaaagaaacagatgtttcagatgagacatttaagacatccaaccttggagttctgcttccggcagatcaggaactgaatgaaataccatttttccaacagtgtctgatgggaatctgtgaaacagctgccagcaaattgtatgaggtacttgtgatcatgctggaggcgaacgatctgtccagagtcaaacgggtggttcaggaaaataaagtggatggaatgatcgtaacccgggcgctgaccaatgatccggtgatccaatatctggaaagtgagcatgtaccgctggcggttatcggggaagtgaaaggacacgaagcactgtatgtggatgatgatacggtggaagcctgtacgcagatgacagattatctgttgggacggcgcatcaaccgaatggcattgattggtggaaacgaacagcatacggttacacagaaacgtttgcgcggatttgagagagcacatgagatttattacaagaaaataccacaggatctggtgtatttaaattgcgcgacgaaagcagatgtctttgccgcagtggaagaacttgcagaaaaatgtgtggaatgtattgtgtgcatggatgataaaatttgcagccatgtactgatgaaattaaaccgcatgcatttgtcgattccaaaagacataaaagtagtgtctttttatgatagtttttttctgcaaaattacataccgccggttactgcgatttcctttgatgagcaggagcttggacggcttgcatgtgaaaaactgatcggatggctggaatccggggatgcgggtgagaagatttccccggggtttgatctggtattacgggcatctaccaaaatgtagatactaagagcaattttttaaaacacattagcaaataaacacaatgaaaacaaagaaattgtggtttataatgagcgcaagaagttaaagggcaagaaggatagtaaaacttataagaaaaaagaggaggatatgaaaaatgaagagaaaagggattccaatgaaagcatttgcctgcctgctggcagcggcaatggcaatgtcaccaattacaggtgtttctgcaaaagcagcagataccacagctgtatctaaccagattgaaaatgatatattctggcacgatacggacggaaatccaatttattctcagggtggtggaatttttaaatttacagttgatggagtgacgaaatattactggtatggtgtaaagtatgacgaaagtgagatatactataacgattccagtaaagcacagaagaacaaccattttgcaggcgtaacctgttacagctccacggatttaacgaactggaagtacgagggcgacgtggtagttccggaagaaattacaaaacgtgaagaaatggataatcaggatgtggaatgggtaggacgtcttggtgttgcatatatggaagataccggtaagtatgcactgtttgtacagcatgaatgtgcagatccggataataagctggataaaaatcagacagataattacagcaaacaggtactggtacttacttctgacagtccgactggacagtttaaatggaatcagcgtattgatatgagagactatactggcggaacaacaaataccggtgatcagaccgtatttaccgatgaagataccggaaaagattatctggtatattcctatggttccggacgaggcaaaatctttatctctgagattcagacacaggcagatggtaaagtaggacttggaccttcttatatggtatacaaaggagcagggcgtgaaggaaactgcatgttcaagtacaatggcaaatattatatctgcgcatcagatttgtatggatggaatgcttctcatgcatattatatggtacttgatagcttagatgagtcctatctggctgcaaaagcaaagaatccagagacaaatatgaagataatgccgggctgcagcgatgacttctgccatgtaacccagactggatttttctacaccgtaaaaggaaccgagcaggagaccgtattattctgtggagaccgttgggcagattttgccagaaacggacttggttataaccagtggtgcccgttatcttttacagaagacggaactccatattacaattctctgagtgcatggaatctggacgcagagactggaacatggacggttgcagataaaaataactatgtaaaaaatggcagctttgatgcagatcgtgtgggcagtacagcgttggcaggctggacgaatcaggtgacaaaaggaaaaagcccgattaataacaatggaaccacaacaaccggaaaatatgcactgcgcctgggcgacagcacagatttctcctgtggcgtatcacagacgatccagagtaatcagtatgttgccctgccggatggaacttatgatatgagtgccaaaattaaaaatggtggaaacttccagaaactgcagatgtatgcagaatccggtgatgtatccatgaacatcgatattccacagaatcagtcagaatggacagacgttacaatgaaaaatgtaactgtttccggcggaaaagtaacggttggtttcaaggcagacggagaagcaaatgcatggtgcaatattgatgatgttacctttgtgaaatctaccgatgcagtggaaatgggaaaagtttccggaacaatttcttctgatctgaccggtgaaaatctgattttacgtgcacagagtgagacaggggatgtttatacaaaaacaattctgctggatggagaaaaaacagactatagctttgattccttaaaaccgggtaagtataccatcagtgctgaattagatggagccgagattgagggaccaaacagcagcgtagaagttgtatctggtcaaagtgtcagcggcattgatttttccgtaaaaaatctgtccggaaatattgcaggaaccgttacaagcggtaatgctgcactggcaggtgtaacggtaagcttaaaacagggcgataccgttgtggcacagactgagaccgatgcgagtggacagtatcaattccgtaggattccggcgggtacatatactctgagttttgaaaaaggtacttatgagacaatttcagatgttgaaatacaggtaacaaaaggggaggaaacttccgtttccaatcaggaaatgaagagtatgtccggtgacctgagcggctttgttttcctgacagatggaacaccggtaagcaatgcatctgtattactgagaaaaacagacaaccgagcagatactttgacttatacagcacagacagatgaaaatggaaaacttgcgttaaacggagtagttccgggaacttatcaggcaattgttacttccggtagtctgaccgctgttaaatccaatattgtaattactgagaataaagagacaaccatgccggtactgatgtcaaaagagaagattacggttccaaatggagattttgaaacagcatggtcaaataaaagatcaattccaaactggtctcttgaaggtacaggagcttttctggaaaataaaacaccttatgcgggaaaaacacgtatcagcttctggagcagcagtgcattccttggacatatttaccagactttaacaggattggagaatggaacctattatgtgactgccatgataaaaggtgattacgctgacggagatgagagctatctctatgccaaggacagcgcgggtaatgttatcgcaaaacaggatatgccgatttccgaaaacgactgggtcaaagttggtattccggtgaaagtaacagatggaaccatgaccattggtgtatatggaaagatgagcggaagcatgtggatgaatctggacaatgtggaagcatattatgcaggtccgacagacactgacgttgacgcaaccgaaaaacagattgatgcacttggagatattaccttagccagcgaagatgcgattgcagaagcacgagcagcgtataatgcgttgactgatttacagaagatgcaggtaaacaattacgagacacttcagaaagccgaagaaaaacttgcggaactgaaggaagatgcagcaaaggtaaaagctgtagagagccagattgacgcacttggagatattaccttagccagtgaagacgcaattacagaagcacgggcagcatatgatgcattgacagatgcgcagaaagcacaggtaagtaattacgaagcacttcagaaagcagaagaaaaacttgcagaactgaaagaagatgtagcaaaagtaaaagacgtcgagagcaagattgatgcaatcggaactgacattactttagagagcaaaggtgcgattgcagaagcacgagcagcatatgatgcattgacagatgcgcagaaagcacaggtaagcaattacgaggcacttcagaaggccgaagaagaatttgcgtcattgacggcgtatggaacaggcatttatacggttgatggagaagatgtatattatctgaatggaacacgtcagtacgttacagatgtggctaaagtaaatggaacctggtacaatctggtaaatggtgtggtacagaagaaagtgactgttgctaaaaaccacaatggctggtggtacatcaacaaagacggaaaagtagactttaatgccaataccgtagcaaagaacgaaaatggctggtggctgatccgcagcggaaaagtagactttaatgctaatacagtagcaaagaatgaaaacggctggtggttgatccgcaacggaaaggtagattttagtgccaacacagtagcaaagaacgaaaacggctggtggctgatccgtaacggaaaagtagattttactgccaacacagtagcaaagaatgaaaacggctggtggttgatccgcaacggaaaggtagattttagtgccaacacagtagcaaagaacgaaaacggctggtggttgatccgcaatggaaaagtagactttagcgccaacacagtagcaaagaatgaaaatggctggtggcgtattgaaggtggaaaagttaatttcaattttaatggaattgcaagcaacgaaaatggtcgctggtacatcagaaacggaaaagttgatttttcctataatggatatgtaacacagaatggtgtgcggtatcacgttgttaacggaaaagtcaaataacaaaaacttatgaaacgaaaatatggttgatttagtgaaagctggatcaaccatatttttttcacggtcgagaagacttccgctctataagtggggagtaataacaagtccgtatatgtgtgaatgtttttgcctaagaaatagcaggttgtgtgttatatgatcaacttttacagatagtttcatactaattaatagatagagaatgaaaagggatggaaaatgaccatgatgaatctgcaaagtaatctgacgggacagggattagcagatttcgcagaaggcagaatcggaacgccatatttttacggagcgaaaatctctcatggaattttgacagaagaatttgtgcaggaactacacgaaaaactcccggatctggtaacggatgattatgtggtacgggcaagacagcagggacaggttggaaaagtgaataccgattgttccggactgatcggggcttatctgggcgtggagttgagctcagcgcaaatgtatgcggtggcagatcaacgaattgtgtatgaaacgtatgcatggctccctgtaggaaccgtactctggaaaccagggcatgtgggtgtttttcttggtaaatgtgatggcgcgtatcgttgtgtggaagcaaaaggaatcaattatggaaccatctgctcaaatgtaaccgacaatgactggcaatatggtctgctttttccgtgggtaagttacgatatggagaattgcaggtcggataccatgacagaaaaattcagtattacacgaaaaggtgaaaatccatatttacgtccatatgtatggatcatgcagccagaagaagcagcacagcatccggctgtaaaaaagatcactcacggagaaggcgttcgctggctgcaatgggagctttgtgaggcaggctatcccgtttctgtagatggcgtgtttggttcaaaaacaaaaactgccctgcaaaaatttcagatttcctgcgaactgcgtccggatggaatcgcaaaatttgaagaactgggaaaaatctctttatctccaggaagttttcatgtataataacaaggttgagtgataatccaaaatacaggaggaactatacatattatgaaaaaagtagaagattacgttagaagtatccctgattttccggaaccgggcattatttttcgcgatataacaaccgttctgcaggatccggacggactgaaacttgccattgacggattaaaagagcgtctggatggcgttgattttgatgtggtagttggagcagaatccagaggatttatctttggcgcaccgctggcttacgaatttggtaaaggttttgtaccggttcgtaaaaaaggaaaactgccgtgcgagactgtttctgcaaaatatgaccttgagtacggttccgcagagatcgagatgcacaaagattccatcaaaccgggtcagaaagttgttgtagtagacgacctgatcgcaacaggcggaaccatcgaggctgctatcaaactgatcgagagccttggtggagaagttgtcaaagtattattcctgatggagctggctggtttaaacggtcgtgagaaactgaaaggttacgatgtagagtctgtcattacttatccgggtaactaaggacatcgaagttctttgaaaaaaaatttcacagtcaaagtgaaataggaaaaacaaatagttaagaaaaaagctttctatatagaagtgtcagttgaatctgatcgtttctatatagaaagctttttatattttccgagtcaaagcgggtgcgtaaaatggcattctgcacggaatctttattaaacaaaatgacatcctgatgatccagatcagcagctgtgatagagatatgatcagccagcgggtgttccggtgaaacacaaaatacgagctggtcgtgaatgagcacatgactgtcgagctggtcaatattgtatatcagatgggagatgactcccacctataggtggtgagaaacaagctagtatcagtggtgggagccaatcccccatctgatatagcctccggcaggagtacagaggtgcgcagttgaagtatgtcatgcaattgcatgacgcgcacctcgcaacaagaatgccggagcattcttgaattccatgatgacgagagccagatccagtttatcctcctgaaccagatcacaggcgcgtacagaaccatactcctccagtgagacgagggcatccggatatttggaacgataggcatcaatgagtccaggaaagaaaaaactgctgagcaccggtggaatgccgacatggattggattttgctgaatccggctgccgttcaattcaaactgcatgtctttgcaatactgcagaatgtagtctgctttcttataaaaaagtgcgccatcttctgtcagagtgagtcggttgttaaatctggtaaacagcgtgatgccaaattcggcttccagttcccgaattgccagggaaatggccggttgcatcacaaaaagctgatttgcggcagcagtttttgtttctgatatttgcgattgtcagctttatattagaaaaaattccactggggcttaccgctaccatcgtagcgatcggattaaatgtgaccggggttctggattaatgcaaatgcagcaaaaatggagagattgttggagaacggaatcaatgcgatcggtcttggaccgcagggtatgggcggaaaatattctgtcataggtgtaaatattgaaaatacggcacgtcatccgtctaccattggtgttgctgtaaacgtgggatgctggtcacattgtgatcgacaaagagctgaacgtagtctgtgatacacattctacctggaaatttgagtaaaaaataaggaggataaaaagatgattgaaatcagaggcgataaaaaaggcattgattggtattttgtatactttgcatagaatacaagtgaatttgccaaggaaaggcacaaaaatgataggcaaacaggaacatttttcttgaatttttgttcaaaatgaagtagaatgattctggtatgttaataaaataacaatctcaaggaggtatgaggcaatatggcagaatgtttagcgttagagcgaatcaaccgtctgttagatgagggtagtttcgtagaggttggcgcattagtttccgcccgcatgacagattttaccgtaaatgaccagtccgcaccatccgatggtgtcatcacaggttacggacagatcgagggcaatccggtgtatgtatacagtcagaaccgtgatgtgctgaacggaacaatgggcgagatgcacgcaaagaagatcgcaaaattatatgatatggctgacaaggcagcagctccggtgatcggactgttagactgcggcggcttccgtctgcaggagtctgtagatgcactggacagctttggcacagtgcttgcaaaacaggctgagtatgcggacagtgtgcttcagatcagcgcagtaatgggtaattgtgcaggtggcatgacattgatcccggccatgagtgattttgcatttatgacaaaagaagcacagatgtatgtgaatgcaccgcatacaattcaggataataaaaaactttcccgtgagttcaattccgcagactatcaggcagcagtttccggacaggcagaggtgctggagagcgaggacgctgttctgacaaagatccgtgagctggtagtgatgctcatcgatgaggaatacggacgctgcggtgaggacgatctgaaccgttacatctctgaaaaaacatgtgccatgaaagacgcccgcgcactgttaggtgagtgtgcagacgataaatttctggagatccgtccggattacgcaccggagatggtgacaggattccttaccttaaatggaattttagttggtgcagtggcaaatgccgatgcactttatgatgaaaaaggtgagaagacagctgatctggctgacggacttaccgtagacggatgcgagaaagcagctgcttttgttgcattctgtaatgactgtgagatcccgcttctgaccgtaactgcagcagatggatttgcagcagtagaacagacagaaaaaggtcttccacaggctatcgcaaaactggtaaaagcttaccacgacggcggtttcaacagtaaagtaaacctgatcatgggcgatacttacggcagtgcttatgtggctatgggcgcaagaagcatcagcgatgctgatatggtatttgcatgggatgacgctaaagtaggtatgatggaagctgaaaaagcagcaaatatcttatttgcagctgaaggagagaaagcaactgaaaaacaggcagctgcttatgaaggaaaacagaatgccgtaacttccgcagcagcaagaggcagtgtggatgcagtcatcgctccggcacagacaagaaaacatctgatcatggcattttccatgttgtaaaagaaaggaagatagtgaagatgagaaagaatatcaaagggattgcggcaggcagtctcggacttctggctttacagcttccggggatgaccgtatttgcgcaggcagcagacagaaaagcccgactggcaaatgcattacagaatacagttcttggtatgggaacggtattcgttatgctgatcgcaattgcgctgatcatttactgtttcaagatcattcctgtgatccagaaaaaatttgcaaaagaagcagaaccggaagcagaggcaccaaaggcagcacctgttgcagcagctccggtacaggaaacagacgatctggagctggttgctgttatcgcagccgcgatcgcagcaagtgagaatgtaccggtagacagtttcagagtccgtacgatcaagagacgctaatcacaccattttgtttaaggagaatagaaaaatgaaaagttatacaattaccgtaaacggaaacgtatatgatgtaaccgtagaagaaaatacaaatggcgctccggcagcagcaccggctccaagagcagcagcaccggcaccggctccggcagcaaaaccggcagcagccgcaggcgcagcaggaagcatttccatcacagcaggcgcagcaggtaaagttgttgacgttgtagcagcaccgggtgcagctgtaaagaaaggtgatcctgtcgttgtacttgagatcatgaaaatggaaacaccggttgttgcaccacaggacggcacagttgccagcgtagaggttgcaaaaggtgagaccgtagaatcaggagcagtacttgctactatgaacgcataagacaggaggtagacatgtcaggtaatatagcagagacattgggcaatctcgtgcatcagactgcgttcttcaatctgacctggggaaactatctgatgatcgccgttgcctgtgtgttcttatatttagcaatcaaaaagggatatgaaccgttactgctggtaccgatcgcgtttggtatgcttctggtaaatatttatccggatatcatgatttctccggaaaatgcaagcaacggtgtcggaggtctgttgcactacttcttcaaactggatgagtggtctatccttccgtccctgattttccttggtgtcggcgcactgacggatttccgtccgctgatcgcaaacccgatcagttttctcttgggagcagccgcacagttcggtatttttgccgcatatctgctggctatcgtattcggtttttccgatgcagcagctgcagcagtatccatcatcggtggtgcagatggaccgacttccatcttcctggccggaaaattacatcaaaatgacctgatgggtccgatcgccgtggcggcgtattcctatatgtcattggtaccgatcatccagccgccgatcatgaaacttttaacaaccaaaaaagagcgttccatccgtatgggacagcttcgtgaagtttccaaactggaagcaatccttttcccgatcattgttaccatcattgtgtgtctggtacttccgaccacagctccattggtaggtatgctgatgcttggtaacctgttccgtgagagtggtgtagtaaaacagctgtcagagacagcatccaacgccctgatgtacatcgtagttattctgcttggtacatctgttggtgcatccacaagtgcagaagcattcctgaaagtgacaacacttcagatagtagtacttggtctggtagcatttgcattcggtaccgcagccggagttatctttggtaagatcctgtgcgttgtaacaaaaggtaagatcaacccgctgatcggttccgcaggtgtatccgccgttccgatggcagcccgtgtatcccagaaagtcggtgcagaagaagatccgaccaacttcctgctgatgcatgccatgggaccaaacgttgccggagttatcggaactgcgatcgcagccggtgtatttatggcaatattcggtgtataactttgtttacaatgtcgaaatcctaaaagcatgtcatgcttgcatgtaaatgctttacaggattagcgacacgcccctccaatgagaaaaaaagcaggacagagtcatgcgattttcgaatggagggaggattgtgggagctgaaacagcggaacaatccgtaaacaaaggcaatgattataaaaaaggagataatttatcatggagaaaaaaccattgaaaataacagaaactgttctgcgtgatgcgcatcagtctctgatggccaccagactgaccacagagcagatgcttccgatcatcgataaaatggataaagtcggctatcatgcagtcgaatgctggggcggtgcaactttcgatgcatccctgcgtttcctgaaagaagatccgtgggagcgcctcagaaaattccgtgacggcttcaaaaatacaaaactgcagatgttgttccgcggacagaatattttaggttatcgtcattatgcagacgatgtagtagaatattttgtacagaaatccatcgcaaacggaattgatatcattcgtatttttgactgcttaaatgatctgagaaacttaaaaacagctgtagatgcctgcaaaaaggaaaaaggtcattcccagatcgcactttcctataccttaggtgaggcatatacactggattactgggtagacacagcaaaacgtatcgaggatatgggggcagattccatctgtatcaaagatatggcaggtctgctggttccgtatgaggcagagcgtctggtaaaagcattaaaagaaaatgtaagccttccgatcgaacttcatacacattatacaagtggtgtggcttccatgagctgcttaaaagccgtagaagctggatgcgatatcattgatactgcaatctctccactggctttgggaacatcccagccggctacagaggttatggtagagactttcaaaggcacaccgtatgataccggtctgaatcaggatattctggcagagatcaatgaatactttgctaagatccgtgaggaggcaatggcaagtggactgttaaatccgaaggtacttggtgtaaatatcaatacgcttcgttatcaggttccgggcggaatgctttccaacatgatttctcagctgaaagagcagaacgcagaggataaatacgaggaagtattaaaagagattccgcgtgtaagaaaagaccttggtgagccgcctctggtaacaccgtccagccagatcgtaggtacacaggctgtattaaacgttctgatgggagagcgttacaaagtcgctaccaaagagaccaagagcattttacttggtgagtacggtcagacggttaaaccgttc

SEQ ID NO: 13305 - DNA, 27934 bp, Unknown
  gut microbiota DNA sequence
aagtctcacgtgcgttcgacttgaatatgagaagtacggaataaagaagcgtgctggaaaatgattcgaaaatgaaatgtttctaaaatggagtttttaatgtattcatatataaaaggaacgttagaggaagtcagtgaagatttgatcgttgtggaaaataacggcattggctacaatatccgtatttctgcccgcatgctggatgcacttccggcacggggagaacaggtcaagatttatacctatctgtatgtaaaagaagatgccttttccttgtttggctttccaagcagagatgagctggaaatgtttaaattactgatcaatgtcagcgggatcggaccaaaaggcggactggcagtcttatctgtattgtctgccaatgatctgcgttttgccattgtggcagaagacgccaagactatttctaaggcaccgggcatcggaagcaagactgcaaagcgtctgatcattgaactgaaggataaaattgatctggaagctgccatcgagaccggatttgaggaaatggagacaccggcagcaggtggaaacagtaacaaccgcatccgtaaggaggcatcggaagcacttgtggcactgggatacagcgcaacagaggcatccaaggtgctttccggtatcgagattacagaggttgatgatgtggaacgtgtactgaaggcagctttaaaaaatatggcgctgttttaatcggttctgtttaatctgaacgaaattgtatatcagatgggagatgactcccacctctataggtggtgagaaacaagctagtatcagtggtgggagccaatcccccatctgatatagcctccggcaggagtacagaggtgcgcagttgaagtatgtcatgcaattgcatgacgcgcacctcgcaacaagaatgccggagcattcttgaataagtttcaaatatatttgactaagaatcgtacaagaaagtatagttttatagaataaaaaacagtggatataaaataatgtagtgtattgaagcgaggaaattcatggaaaaacgagtgatttctacccagattcagaaagaagatctgcagaccgaaaccagtctgcgaccaatgtctctggaggaatatatcggacaggaaaaaataaaaggcaccctgcgtgtctatatcgaggcggcacggcagaggcaggaaccgttagatcatgtgttgttttacggaccgcctggacttggaaagacaacactttccggtatcattgccaatgagatgggcgtacatatgaagatcacttccggaccggcgatcgcaaaaccgggagaaatggcatcgattttaagtaatttgcaggaaaatgacattttatttgtagatgagatccatcgtctgaaccgtcaggtggaagaagtgctgtatccggcgatggaagattatgccattgatatcatgatcggaaaaggggcatccgcccgttccatccgactggatctgccgaagtttacattggtgggagcaactacccgtgcaggactgttatcagcaccgttgagagaccgttttggggtaatccagcatctggaattttatacgccacaggaattgcagacgattattgaacaatcggcaaaaaaacttggtgtggagatcgagccagagggtgccgcagagctggcaaaacgttccagaggaacgccacgtctggcaaaccgcctgttaaaacgtgtccgtgatttcgcacaggtaaaatacgatggggtgatcacagaagaagtagcttcttttgccctagatctgctggaagtagatcgctgtggtctagataagaatgaccgtttgattctgttaaccattattcagaagtttggtggaggaccagtgggacttgaaacactggcggcagcggttggagaagattccggtacgatcgaagatgtatacgaaccgtatctggtaaaaaatggatttttaaaccgtacgccaaaaggacgtgtggcgaccgcactggcaatcgagcattttaaaggaaactaatactgactgtgagttaaaacagagggaaagaaacatgacaaaaaaatcaatggtacaggtggcaattggtggaaaagtattgacaatgggcggtgcggatgatgagatacacatccagcgtatcgcgtcctgtgtcaaccatgtacttcaggagtttgaagataaggatgaataccgctgtctgccggcagatctgaaacctgtactaattcatattaatattgcagaagaactgatcaaagcacaggatcagattcagcagttagaggaagatctgcgtctgaaagagaacgaactggcagaactgcgacaggaactggcagagacagaagtaagacttgagagactggaaggacatcaggaatgagaaaacatgaattattatccccggcgggatcgctggagatatgcaaagcagtgttgaatgccggagcggatgcagtttatctgggcggtgacaaattcggtgcccgggcatttgctaaaaatttcacacagaatgatattcaggaagctttggattttgcacatatgcgcggaaaaaaaatatttctgacggtcaatacactgttaaaaaataaagaaattgaaacggagctgttttcttatctgaagccgttgtatgagcatggattagatgcagtcattgtgcaggattacggtgtgtttcagtttgttcatagaaactttccggaacttgcactgcatgcaagcacacagatgtcagtatctaatgtgtccggggcaaagtttctggtggaacacggcgcagagcgtatagtaactgcccgtgaattatcccggtcagagattcgtcgaatctatgatgagaccagagtggagattgaaagttttatccatggtgcactttgttactgttattccggtcagtgcctgatgagcagtatgcttggcggacgaagcggaaaccgcggacgctgcgcacagccttgccgtctggcctatcaggtaaccgacgagcgtggcaatttgttacataagaaagagaaatatccgttaagtccaaaagacctgtgtacgatttcacagcttccacagttatgtgagagcggtatttattcctttaagatagagggacgtatgaaaaagctggaatatgcggcaggtgttacttctatttaccggaaatatctggacttgtatgaatcatgtccggaacattaccgggttgaggatgcagatatggagcgtctgctggcatttggtaatcgaaatggttttacggcgggttactatgatatgagaaacggtcgttccatgatgacactgacagattcttcccacagcagcaacgaagcgaaggcggcttatcaggcaccggaagagacaaaagttccggtagaattaaaagctgtatttcatgccggggaaccaatgcagttagaggcagcattatccgtgaacgacacagaggcagaatcccacagtgataaaaaagtctgtgtgaccggtgaaatcccgggaacggcacagaatcgcccactgtcaaaggatgaattaagaaagagactttccaaaacaggagatacaccattttacgtacagcatctggaaatcaatctggaggatggattgtttgtaccggtgggacagatcaatgagcttcgcagaaatgcgctggaacagttacaggaagcggtacttggcagctggcgaagaaatgaagtggtgacactgaaaaagagatcaactgacggaatgagaatgaagcagaatggagcaattggcagcggtgataagccaatgttaaatgtatggctgaccggttctgctttgcagcatctgggagcagttctggaaaatcagacaattgatatggttacgctggaaggttttgcaaatctggaagcagcagtaaaagagatccatgctgccggaaagcaggcaggttatgggttcccttatgtgttgcgggaaaattcggaaggattattgcgaaaacagggatctgtgttaaaacagtttgaccgcatctgggtacgaagttacgacggcataggttttgctaaggaagagttatatcttccggcagaaaagcttgcattagatgcaggactgtatgtattttccaatgaggcagccgcagattttatggcagatggattcgctggttatactgcatccatggagctgaaccggaaagaactggctcatatggagaataaacaggcagagttaatgctttatggttatgcaccgttgatgatttcggcacagtgtgtatacaaaaattatgcgtcctgtatccgggagcaaaaaaaagaatctggaaagcagtcgcagcggttatatttgaacgatcgttatcagaagcagtttgaagtgcagcgggactgtacccattgctacaatgtaatctacaacagccagccaacgtatcttttacatcatgcggatgaaattagcggtttggattttggcgcacatcgcattgtttttcgcaatgagtcagcaaagcagatgcatgggattttacagcaatatgaagatgctttccggtcaggcaggaagattcagccgccgaaggaaggaacttacaccaacggtcatttccgccgtggcgtggattagaagagaagttaaggagcagatatgatacatttgatcacagaattgtccaaatatgtgatgatcattctttttgcaatctatacctggtacagttatgtggtactggtaataaaaaatgaggaacggcagaaacggatgtacaaagcgcagacaacctgcatgtttttgatccatctggatgcctttatggtattgtttgcggtgacaaaggattttaaaatactgatcttttatggtgcacaggtgctgtttgtgctgtttttattcctgatctaccggatcatatacaagcgggcagcgcgtctggttgtcaatcacatgtgcatgttgttactagtaggatttattatcctgaccagactcaattttgaaaatgccatccgtcagtttgagattgcagtggtggcggcggtggtatcagcgtttgttccgattttggtaagaaaattaaaatttttacgaaaatttacctggttttactgtgcggtcggcgtagtagcacttggtatcgttctggtgcttggaaaaatgagtggtggtgcacatctttctttcacggtagctggtattacgttgcaaccgtcagaatttgtaaaaattatatttgtatttttcgtggcatgtatgctttatgaagcaacagattttcgacaggtgtgtattacgaccgttgcggcagctgtccatgtgggaatcctggtactgtcaaccgacctgggagcggcactgatctttttcctgacctatgtggtaatgctgtatgtggcaacccggaaaccggtttacttttttggtggactgggcgtaggatgtctggcagcactggcaggttctaagctgttttctcatgtacgggtgcgaatcgaagcatggaaagatccttttgcctccattcatggcggcggatggcaggtggcacaggcattgtttgccattggaaccggcggatggtttggtatgggactgtatcagggaatgccggataagattccacttggatcatcagatttcgtgtttgcgtccatttctgaggaactgggcggtgcctttgccgtgtgtatcgtgcttgtttgttttagctgctttttgatgtttttgaatattgcgatgcagatccgggatcagttttataagctgatcgcactgggacttggctgtgtgtacggcgtgcaagtgtttttgaacgtgggcggtgtcatcaaatttatcccgtctaccggtctgacacttccgctggtcagctacggaggaagttccatattatgtacgatcattatgtttgcaattattcagggactgtatattatgagacaggatgaagaaggagaatcgaatgagcagaagagtcgaggacgaaaacaaaagagggactacagcaagaagaaagtcaacggcgtccggtcacagcaaaagccaaagatcaaatcgggtcagacagggtatcgaggtcatgaatctggatcaggcagaccgcgaggcggcgcgtcctcacggttcgatgaggacgagatcgaggaaatctggtaaaactggcagaaatctggaatttctgatcattacctatctgtttctgacaatttttatcggtatgatcggatattttgtttatttccagctggtaaaaagtgagagtatcatcaacagctcttataattcccgtctggatctgtatgcagagcatgtggtacgcggagatattacggcagcagatggcacggtacttgcgaaaacgactgtaaatgatgatggcagcgagaccagagaatatccatatggaaggatgttcgcccatgtggtcggttatatgaataatggaaaaggcggtctggagtcacagtacaatttcaacctgcttcgttcccattcctttttcctgacacagattatcaatgatctgaaaaatgagaaaaataccggagatacactggtgacaacactggattatgatgttcagaagacggcatatgatgctttgggtgaccgggacggagctgtggttgtcatggagccaaagacaggtaaaatccttgccatggtgtcaaaaccggactatgatccgaacacgctggcagataaatgggatgatattgtgtcggataacagcagcagtgtgttgttaaaccgtgtaacttccggtctgtatccgccgggatcgacctttaagatatttacaacattggaatacgtgcatgagaatccaaactatcaggattacagtttcaactgtgagggagaattgaacgtggatggcaatgaaattcactgttatcacaaatccgttcatggtcaggagaacttgaaggattcctttgcaaattcctgtaatacgtccttttccaatattggactgtctttgaatattacaaaatttcaggaattgtgtaatgacatgctttttaatcagaaattgccgggtacgctttcaggaagcaagagtagctttactctgtcaaaggatgcggataaaggcaagattatgcagacttccatcggtcagggtgatacgctggtatctccacttcatatggtatttgtagcatctgccattgccaacaatggagttgccatggagccttatgttgtggattatgtggaaaatgacggtggtgtgcatgtgaaaaactacaaagaaaaagagtatggtcagctgctctctgaatcggatgcagcgcttttacaggactatatgcgcggtgttgtggaaaatggaaccggaaaggcgttaaatggtcagagttacactgcctatggcaaaaccggatcagcagagtacaacagtgccggtgacagtcatggatggtttgtcggttatggaacaaaagaaggctataatgacattgccattgcggtaattgtagaggatggcggttccggaagccagtctgccgtaccggtgacaaaacagatttttgacgtatatttcaataaataaaaatgggcgaggtattgcaagttaactccaaaaggcgtatacttaaaatcagatttgagaccgcatcgggagggcttgcaatgattgaagcaaccagctgtggcggtgtggttatattccgtggaaagattctgttgctgtataaaaattatcgtaacaaatatgaaggctgggttttgccaaagggaacggtagaagccggtgaggagtataaggatactgctgcaagagaagtgagagaggagactggcgtagatgcctctatcataaaatatgttggaaagagccagtatacatttacagttcccgaagatactgtagaaaaacaggtacactggtacctgatgatggctgacagttattacagtaaaccgcagcgcgaagagtattttgtggattccggttactacaaataccacgaggcttatcatctgttaaaatttgcaaatgagaaacagattctggaaaaagcatacaatgaatatcttgatttgaaacggagtaatctgtggggaaccaagaagtatttctagaacccggaagagacagaattagtaaaacgatctttacaaatgagatggttttattaattctgtttgcatattagcgaaaatatcagacgaaaataaaaatgagggatctgatttatgttttggtacaaacacttatatttggacaggaagtgtatgcgccataccaatcggttaaaatataagattgagcatggagcagcgcataagggggtatatctcattcatcttccagatcgtgcaggtgccgttctggagctgataccaagtattctgttacggcagagccggtatccacgggaacagttgtgcattataggcatggcaggtgaccgggcgggtgccttagagctgatccggaagatcgtggatgaagtatatcgggagcaacacaattttgatattgcgtcctatctgcagatcgaccggaaaaatacttcggatgaggggaccggcctatgatgatttttttacttatattgaaaataatcggtatcatactgtgtgtgatattgggagttctggcagtgatcctgtttgtcccagttttttacgaggcagatgccaatatcgatgagatggattataaagtccggatccactggttggcaaagctgattcgctttgagtttcggtggaaagaaaaggcacatgcagtgctgaagatcctctggtttgtgatagattttaccgatccggaggcagtagccgccagaaaagcaaagaaagaggaaaaagcccgcaaaaagctgttaaagcagcagaagaaagaagcaaaagagcgggaaaaacagacgcgtcagagacagaaagaggcacagcaggaacaggcagaccgtgaagcacgggcacagcagagagaggcatttcgaaaacagcaggaagaagctggcagcagggaaaatcagtctgagaagacgttagctgaggatgccagtggaaatgatacgaaaacagaaaaaatagcagacgtggatgccggcaggattgaagtggaaacgaaaaatgtggaagctataaatgcagatgagagtttccataaagaaacgtctgtggcacaggataaagagacttatgaaaaagcagaacagacgaaaccagagaataatgtccggcaagagtctgttgaatcagaaaaagcagaagcgaatgaatcgagaacatctattctggaaaaattaaaatccgctcatggaacagcaggatccattttggataaagtaaaaacggtgttggcagttatccgttatttgcgggaacaggaactgatctcagcggtttgggtaaaattacaggtgtttttgctgcatatccgtccgcgaaagctaagtggtcatctgaagttcggattatcgaatccggcagacactggtcaggtccttggtgtgattgcgatggttccgttgttctatcagacagaacttcaaatcgaaccggattttgaagcagaagataattatattcagggacaggtatatgtgaaagggcatatttgctgtatccatctggtgatcctgatcattcggttattgcgggatgaaaagatccgaacattgattcgtaggataagagagaaaaattaacaggaggtattggaaaatggcagagaataataaaaatacatttcagacaaccgtagaatctctgatgaaaggaatggatggatttgtatcatctaaaactgtagtcggggaaccacttcagatgggtgagaccatcatccttccactggttgacgtatcctttggtatgggcgccggtgcattttgtggggaaaagaagaaaaacagcggtggcggtatcggtggaaaaatgtctccaagctccgtacttgtactccagaacggaagcacccgtctgatcagcgtaaaaaatcaggatggtatttccaagctgttggacatgataccggattttgttgacaaatttatgaaaaagatggatgagaaaaagaatccggaagaggcggaagccagaaaagaggcaaaaaaagaagctgctgaagagatgaaagacatgctcaatctcagtgaagaatagaaccttccctgagattaagcagagtcataaaatcccccgcattgtcataagatagtgcaggggacttttttatgtgtaacagaacgaccaaacaactggcaggttttatcctgttctggatcgggatcggcatgatcgtgatgctgtttatgccaaataattttgttggaattttaattgccagtggatttatgctgcttggctatacattatattgtaaatcgtgagaaatgcgtaagttatatgaattgagaaatctgcttttctttctagtgctccaagtgaaataggaataaggtgaattgcataaacagagcgagaaagaatagtggttagtttgtctgataaacgcaaaaatgactggcagatttctgccagtcacttcaatgttttttcttatgctctttcaactttgttggatctcagacaagaagcacaaacgtataatgatttatgagtaccattaacattacatttaactttcttgatgtttgatttccacattctattagatcttctatgagaatgactcacattgtttccgaaatgagcgccttttccacaaacactgcactttgccatgattgcacctccttgcgtttactaagttcgtatgttctgcgaactcacaacaaatgtattctatcagatgaatcccgataatgcaacaattattttgaaaaaaatgaaaaaaattccgaaaacttgatatatttttgatttcactattccttttttatgaaaaaatgggtataataaggcatatatgaaaatatgggtaagactgcattttgaaagtaagggtatattttatgtattctgatgcagaaacattgcctgaaaataagaagcgtggaggagcaagtatgagaggtcagtttgaaaattctcttggaacggttagtatagattcggaagtagtagcaacttatgccggttctgtggccgtagaatgttttggtattgtaggaatggcagctgtcaatatgaaagatggtcttgtaaaattgttaaaaaaggattatcttcatcatggtatctctgtaaagattgaagagaataaccggatcacattagatttccatgtgatcgtatcatacggtgtaagtatttccaccgtatcagataatctgatttccacagtaaaatataaagtggaagaattcaccggcatgaagatcgagaagatcaatatcttcgtagaaggtgtcagagtcattgattaaggaggaattgagtgtggatatacagacaatagatgcagcgcttctgtcaaaaatgtttttagcgggagcgaagaatctggaagcaaagaaagagtggatcaacgagctgaacgtgttcccggttccggatggtgataccggtacaaatatgagcatgacgatcatttccgcagctaaggaagttgctgctgtggaaaaaccggtaatgaaagatcttgcaaaagcaatttcatccggttccctgcgtggagcacgaggaaactcaggtgttatcctgtcccagttgttccgtggatttacaaagaccatcaagcattatgataagatcgacaaaatcgttctttgtgagtctttccagaaagcatgtgagactgcatacaaggcagttatgaaaccaaaggaaggaacaatccttaccgttgccaaaggtgcagctgagaaggcactggagctttcctgtgatgacaattacaacatggagcagtacattgccgctattatcgcagaggcagagcgtgtacttgccctgactccggagatgcttccggtattaaaacaggcaggtgttgtggattctggcggacagggactggtagaagttctgaaaggtgcacaggatgcatttcttggcaaagagattgattataccatcgaagctgctccggcatcttccggtgtggttaaaatctccgcacagacagaagcagagattaaattcggttactgtaccgagtttatcattgtattaaataaaccgctgaccgaggcagaagaggacgagtaccgtgcattcttacagtccatgggtgattccattgtactggtggcagacgaggagatcgttaaaacacacgtacataccaatgatccgggactggtattacagaaagcactgacttttggttccttaagccgtatcaagatcgacaacatgcgcgaagaacatcaggaaaaactgatcaaagacgcagagaaacttgcaaaagagcaggaaaaagaagcagaagagaaagcaaaagcagccgcaggtccgaaaaaagacatgggatttattgcagtttccatcggtgagggtgtcaacgaagtatttaacggacttggcgtggactatctgatcgaaggtggacagactatgaacccaagtacagaggatatgttaaatgccattgatcatgtcaatgcagatcatatcttcatctttccgaacaataaaaatatcgtgctggcagcaaatcaggcagcatctctggtagaggataaagatattattgtcatcccgacaaagaccatcccgcagggtatttccgcaatgatcaacttcattccggagcagtccccggaggaaaataaagacaacatgctggaagcaatcgcagctgtaaaaaccggacaggttacttacgcagtccgcgataccatcattgatgacaaagagatcaaagagggcgactacatgggaatcggtgattcctccatcctttctgtcggtgcagaccgtgaggatgttaccaaagatatggtagcccagatgatcgatgaggagtcttccttcatctgcatttattatggagaggaagtacttccggaagctgtcaatgcattacagaaatactttgaggagacttatccggattgcgaagtagaagtacagttcggtggtcagccgatctactattatgttatttctgtagagtaaggagttcgtatgaatcttaattcccctgttcgtgaaatcaaagggatcggggcgaaaacagaacagttatttcaacagttaggagtatacaccattggtgatatactcctatattttccccgtgattatgaaaaatatccggatctgtgtgacgtagatcaggtggtggaggacagaaaaaatgctttgtatgtgtgtgtgaaaaagacacccaccgtcaatacccattcccgccagcaggtggctttgctggatctgaaaggcgagaatcggacactgcgtctgatctggtttcgcagtccttatatccgatcactgatccgtcccggcggatggtacgttttttatggaaaagtcaaccagaaagatgatcggcttaccatggagcagccccagatgttcagtttgggacagtatgaggcgttgcaaaagacattgcagccacactatagtttgaccaaaggtgtcaccaataatttaattgtaaaaacagtgcatgcagccatggaagagattcccttggaaatggaatatttaccagaggatatccgcatccgcaatcatctaagcgagtacaactttgccttaaaaaacatgcattttccggaaaacgaagaaaactgtatcattgccagaaaccgttttgtgtttgatgagtttttcttctttttgctcagtatgcagttgtcaaaagagaatacccagaagctgaaaaatgagtttactttcgcagaggattcctttgtggaagatctgatgaacggtctgccttatgagctgaccggcgcacagaagcgtgcagtagcacagattcgctctgacttgcgggaaccgtgtatcatgcagcgattagtacagggcgatgttggctccggtaagaccatcgtcgcttttctggcaatgctggaagtggcgcacaatggttatcaagcggcgattatggcgcctacggaagtattggcgcagcagcattatgaaaaactgacacagtttctggaagtgaacggcattgatatcccggttgtgttattgactggttccatgggcgtgaaagcccgccgcgcagcgtatgcagtattagagtcggatcagccggctttggtcgtgggaactcacgcgttgattcaggaaaaagtacagtatcggaatctggcactggttattaccgatgagcagcaccgtttcggtgtaaagcagagagagactttttctttaaaaggttcgcatccgcatattctagttatgagcgcgacgccgattccacgaacattggctattattttatatggtgatctggatatttccgtgattgatgaagttccggcgaagcggctgccgatcaaaaactgtgtggtgaatacgtcctatcgcaagacagcatataaatttatggaaaaagagatccgtgccggacatcaggtgtatgtcatttgtccgctggtggaagaaagtgaactggcagaaggcgaaaacgtgctggattatgcggcgcagcttcagcagatttttccatccgatatcaaagttggtatgctgcacggaaaaatgaaaccggatgagaaaaatgctgtcatgcaggaatttcaggaaaacaaaatccagattctggtatccacaacggtagtggaagttggcgtggatgtgccaaatgctaccgttatgatgattgaaaatgcagaacggtttggcttggctcagcttcatcagctgcgcggtcgtgtcggtcgtggtgatgcgcagtcatattgtattttgatgcaaggcaaagagcagcagacaaaaaacaaacgtctggagatcttgaataaatcaaatgacggtttctttatcgccggtgaagatctgaaactgcgtggaccgggtgatttctttggtattcgccagagtggagattatcagttccaattagcagatgtatttcaggatgcagacgtgctgagtaaggcatcttacgaggtatcggtgttgatgaaggaagatccacatctggagaaggaagaacatcagagactgctggtacggttgcggcagtatgccggagatcagttttctttgttaaatttgtaaaaaacgcaaatggttaaaaaaatgacgatccaaatgatgttttgtattatggaattgcattctgtaaggaaaatgtaaagcagttatagaaaaaggtatgtgaaaaaagccggtgggagcaggtgcgcttccatcggctttttttgtcttaatgtgtttttcggttaatatattctgtcttatatttagaataaataattttctgactactatacagtccataatatccggacaacatataactcagcgcgatcgcaatcagaaaatacggcattccctcaaatccaaacagctcaaaacagatcagcagggaagtgatgggactgttggtaactccacagaataccgcgcccatgccaacagcggcacacagcggaatggaacatcccgtaacggttgcaaaaaaggttccgaaggttgctccgataaagagagtcgggacgatctcaccgcctttgtaaccggcgccgagcgtggcaccagtaaagagcattttcaataggaaagccagtggaaagaccggttttccttccatgcagctggcaataatgctcataccggtgccgttataggtctgatcacccaccaacagcgtcagtgcaatgacgatgcatccgccaataattacccgcagatatggatttttaaaaaatcgtttatacagacgttctgcattgtgcaggatcgtacaaaataagatgctgaccaccgcgcataacacagcaaatacaccgatgatcagagcggttttcggtgcaaatgccggaatagaactgatcggaaagatttccggtgtaatgccacagacggctgccacaccgtgagcggtcagtgatgcgatgacacatggcagcagtgcggaataatgcataatgccgacactgaccacttccatggaaaagatcgcagcagccagcggtgtgccaaacaatgcggagaaagcagcactcataccacacatgatcataatgtgctggtctttttcatcaaagtgaaaaagttttccaagggaatttccaatacttccgccaagctgcagggcagcaccctcacgaccggcggaaccgccgaataaatgtgtcagcagggtggcaataaagattaacggtgccatgcgcagtgggatattttcgttggagtggatggcggacagtaccagattggttcccgtgtccttttcgtcatgtaacagctggtacaatcccacgatggcggcacctgctcccggcagcagaaagatcagccatggatgctgtaatcttgtgcgtgtgacaaattgcattccatagtaaaaagcagttccgacaaatcccagtataattccgctcagaactgcaaagatgacgtcacggagtgatgtgaccagatgcgaaccgcctctttttagtacatttctatatgattcaaacataactttatctcccgttataaaaacttgctgtttcttattttttccttatttgcctgaaaaatctgcttggaaaaatgttacatgtaaatagttgtttttcccgaacagaaagcacattttcttatttccttgacattgcaagaaaatctaaaatgttttatactttattattatagagaaatcgggaaaaaaagcaatgaaaaacaaattcccgggaagcaggttgtacgaatgaaaagaaaattgcaggatatcatacaggaaaaatttacatatgaggatacacacctgctgttgccggatatggatctgaattttacagcgattgagagtgaaccctttgagggaacgttttcttttcacagcagtaatgaacatccgatccgcggaattgtcagttgcgagcacccatgtgtcacctgtctggataccgaatttaacgggacagatatccagatccggttccggtatgccgacagtcagcagacggaaggaatgacagatcagggtgtgtttgtgatcaccagcaatgtgggtgagtatctgctgccatttcgggcaaatgttacccgccgttatctgatgtcttccattggaaaaattaagacactgaatgattttacgaatctgtgcaaactgagctggaaagaagcgctgcagatttttaaatcccagtatttttgcaatattttacatcatgacagcggattccagaagctgctttaccgtggcttgacagagcatgcctgcggtgccgcacagatggaggagtttctgatcgggtgtggaaaaaaggagcggaatcatctgatcatcagccgtccggaacgcggctataaagtgtcgaagggttcgattttgccacagtcagatctgctggatgtggaaaaaagcacctggggttatatccatgtggagatctcctgtgatgcgccgtttgtccggttggagaagaaacagctgcgttattatgattttgtcggaaaacatgcggaagttcagtatcacattatgccgggattgcttcatgggggcaaaaattatgcgaagatccggattcagacaccattccagacagagacgattaaaattacagttaccgtattaaaggaacgttctgtgaagaagtctgcccattgggaaaatcgctacattcacagtcagatggagaaatattatctggattaccgcagggaggagatgacaaaggaactttggatgcaggagatggaagtgctgctaaaacgtgccatcagtctggatccagaaaacgaatggcttcctttgtatcgtatttttgttctcctgaccggaggggacaaactgggggcagaagcaatttcggaaaaactgccgaaaaatattcagaatcagcggacaccgttaggagcattttatctgtatctgaccaccattggggagacaccggcttacagccgggaagtgaccagaagggtgaaagagatttatctgaaatatccgtcacatccggtactggtgtgggtgttattgcacattgatgaagtgctgcttcgcaatccggagcgaaaatatcaatggattcgcaaatatatgttaaaaggaaatatcagtccgattttttatgaggaagcaacctgcctgctggaaaatcatccggaaatgctgcatgaggtggatgtatttgaacgaagactgctgatctggatgatgaagcacaatcggttgtcaccgcgtatcattgaccgcttggttcctatggcacagttgcagaagaccttcgatccggtttattttcgcgtattatgccgctgttaccgtcagggttcggagacaacggtgatcaaaaatatctgtatctatctgatcaaatgcaatcggtatggtacggtttatttcccatggtttcagcggggtatcagccgtcatttgaagattgcgggactgtatgaggcatatatgctttcctggacgaaggcaaacggcgcactgccggaggagattttgcactattttgtcagaagtaaagcacttccggcgaaacggcgggcaatgctttatgcttatgtggtgcgcaataaagaacggatcggtaagatctggcagtcatatcagccggtgatccgggaatttgcctctcaggaattgaaaaaagaacatatgagcgaagatctggctgtaatttatgaagatatgaaacaacagctgacagatggtgcatggaagtacatgcgtaaatccgcggatgatgcatatcggatccgggtgccgaatccggacatgacagaactttgggcgcttcaggcggattccgaccagatacagaaagtggcattgtatgaacggagtgcctatgtttacttgcattcgaaaccgtttgctattttgtatgcggatcaggcaggaaatgtgtatactgccggaaaacagtttcatttgaaaaaaatgctctccggagcgcatgtttatcagaaagatcagatagaatcggagcagcacccggacaattcagagatttcaaatgatgtggatctggcagaacagatcaaaacatttgatgcgccgatgacagtgatgcagcggagaattactgctgccagagaagaaggcatggacacagcagatgcagaagaaaagctgctggtttatatgctgtttaccggaaatttcctgccgggacacgaacagttgtttgaacgcatcgttgcacgaaaaggagagccattgcttttgcaggcatatatgacatggttttcttatcagtatctgttgggaacggcagaacttccggcacaggtacaaaaatgtttgctggaagaattttcggcaggaagaatgcatcagcactgctgccaggcggcatttttaaaacggtgtgtgaaaactgtaacagacgacaaggaagaagaaatgcgtcatacagaagaagtgctggcaacaaaactgctggagcattttctgttaaaaggcatttattttccgttttatcaggagcttccggccaaattgcagcgaaagtatctgctgtttggtgaaaatgtgatttcctgtgtggcacagccggagcaggtgctgcatgtgatgatttacaatgaaaggcatgaaaaagtacagtccgttggaatgcaggaaatattaccgggattgtatacctgtgtgctgcataccttttttgaaaaggaaatgcagtatgaggcagtgacaggaagtggagaggtgctggagagcggcacgctggaagcaaaaccgggatccgaatatgaagagacacgatatggtcggcttgcagcatggatggagaagaaagacaggcagtctgcttatgaatatgcagaactgaccgatctggcagatgctttgtttctgccgatagaggagtaagagcagtggatcagaaaaaagagttctatgtaggaattgatattggaagagacagggcgatgattagtctgtaccgggaggaacagaaagaaccggagacgatatcgacggtcagaggaatggaaaaatttgggattcctctggtaatgtttctggaaaaaaagggaacaacgtattatggggatgaggctctgaaacgaaaggaacagccgaacggagatttttttgaagatatttacgaaggcgcattgcaggagcagacggaagagaccacattgtatcatggattgtttgtgcagtttgtacggcgtctgatccggttgaaagagcgctatggtctgaagggagatccgacttgtgtggcaatcacagttccggtattgtcacagcaggcgattgcgttgcttcaatacgtacgtcaggagctggatttctcagaaaaagaactgatctttatggattatgcggaaagtttctttttacatacgtatcatcaggaagcggtgttgtggcagcatgatgtggcaatgttctattttcagggggcagaactgagtttttatctgctgcatagaaaaagcggtttgaaagtacagtttgtgacggcagagcagaaacactggcaggtgccggaatcaatctgcacgcatgcggagctgatggatgaatatttttccaatgttgtacgggaatcttttgcaaaacatgcgatttccacggtatattttgtgggagatggatttgatggtaactggttacgggaatccctgcgggtgatgggaacgaacaaacggggatttttagggaaaaatctgttgaccagaggtgcggcatatggtgcatggcgctacagtaagccggaaacatggggatttttctttaactgtgaatacaaaatgcagggggaactggatcttcggattgaaagtcagggagcggacggttttatccgtctgatcgaagccggacagaactggttttgccagacaccgtcttttaaattactttacggcggtactccggaaattgtgttaaaaatcagtcggatcggtgccgcaaacagtcaggtgctgcatctggagcttacagatcttccggatcggccggaagcagctttgcggtttcgcattcaggcaattccgaaaaacggaacagaagtgacattgcggctttccgatgatggatttggtgaatttttcaaaagctccggtaaaatctgggagtttccggtagccttggatatggaaggtggcagcacgatggaaaaagcacggtatggtcaaaaaaaaggaggcagataatatgggaacattgaaactgtgcagggacagacaggcgcagaatccgttctttcttgagggattgtctgtttctgtgtataccttagaggaactttgctatgcgatagaatcgaatctgtttttgctggatgaaaaatggatcggcacatccctgtttcagtggttggaaaaagaactgggagaggcagatctgacagctcatttaaaaaacagctatcgaaaatctaaggatgtttatgaatgtgcggaactgattttgtctgcgtccggtttttacaccgtggagagattgcgccagattgatgagatgctgacgcggatgcgggggaaaagtccgatggagcgccgcaaaatgaaagcggattatttcctgtctgagaaaaaataccgccatgcggcatatggttatctggaattgctgcagcaggaaaatctgatctatctgacagaggagctgcaggggggaatcctgcacaatctgggcgtggcatatgcgcgtctgtttttgtttcaggaagcggcagaaatgtttgcagcagcttatcagaaaaacagatcagagaagagccggtattgttatctgtatgctatgaattatgtgccggaggatgaggtgcttggtaatctggaaccggagattcattttggtacgatgaaagaggcattttcccgttttacggaagtatcggatcaggagcagtattatcaggaacggaaaaaactgtcagatgcatccaattccttcaactggagaggcagagaggaagacctgcgcagacagtggattgccgattataatcaaatgaattgctgaaaatcctttacaaatgggtacccgggcggtataatgtcgggcggatggtattccgaaaggaaacgataccttgtatttattattttgaaacggagcttgtattgctgttcgcaaacaagactcactgtcccaccattaggaaatggagggatgcttatgaatattggatttattggcgcaggaaaagtcggtttttcacttggaaaatatctaaccgagcgcaacgtaagggtgagtggttattatagtcgtaatccacagtcatccagagaagcagcagattttacaaataccagacagtatctgaatttgagacatctggtagaggacagtgatgtcctttttgtggcaattccggattcggcgattgctcaaatgtgggaacaattgaaaatgcttccgattcagaataagattataagtcatttcagtggcgcgttaagctccgctgtcttttcggatattgagcgttatcacgcttatggatattctatccatccgttattcgccatcaatgataagtatgaatcctataaggtgatttcccaggcgttttttacgattgagggagatccgaagtatctgaactggtttttacggctttttgagagttttggaaatccggtggaggttatttcaaaagaggataaggtacgttatcatgcggcagcagctatggccagcaatttatatgttggactggcaaatatgtgtgagcaaatgctgcgggactgcggtttttccgctgcaaatgcacatcgcgcattgtcaccgctgatgattggaaatacggagaatatcatccagtacggtccggtcggggcacttacaggtccgatcgagcgaaatgacctgacgacggtgatggatcatttggagagcttgtcagagcaggaacagaaggtttataaaattctgtccggcgaagtgatcaacgttgcaaaaatgaaacatcccgagcgggattattctgaaatggaaaggatgctcaattcatgaaaaccacagtttctacattaaagaagcaaaaagagaatggtgagaagattacaatgctcacctgttatgattattccatggctaagctcatggatgaagccggcattgaaatcttgctgatcggagattcccttggcaatacaatgcttggctatgaaaatacattgcctgttacgatggaagatatgatcgcacacaccgcagcagtcagcagaggagcaaaaaatgcctttgttctggcagatatgccgtttatgtcttatcagacctctgtttatgatgcagttttaaatgcaggacgtctgatgaaagagggacatgcacatggcgtaaaactggaaggcggtgcaagagtgtgcccgcagatcgaggcaatcgtagcagcagatattccggtatgtgcacatatcggactgacacctcagtccattaatgcctttggtggatttaaggtacagggcaaaagtgaagaagcagcccgccagctggtagaggatgcgaaaaaggttgaggcagcaggtgcctctctacttgttatggagtgtgttccggcaaaacttgccgaagtgatcacaaagacagtttctattccgaccatcggaatcggagcaggagcaggttgtgacggacaggttctggtaaatcaggatatgcttggtatgttttctgattttacaccgaagtttgtgaaacgtttcgcaaatgtgggtgagatcatgaaacaggcgtttgcagattattccgcagaggtaaaagcgggtaccttcccggcaccggaacatacatacgcgatttcagacgaagttattgaaaaactgtattaagaaatgaaattgactaacagtgttagttgattttgaaagttaatataagtagtgttcacctttcattttacacaaaagtatagcgttttatacaaatgtatagaggagaacagaacaaaaataaaaatcgaaaaacaagtatagaggagaatagaaaaatgcaggttgtatcaacagtaaaagaagtaagagatattgtagcaggatggagaaaagaaggaaagacagtcggatttgtaccaaccatgggttatcttcatgagggacacggcagtctgatcagcaaagccgtagagcagaatgacaaagcagttgtcagcatttttgtcaatccgatgcagttcggaccgacagaggatctggagagttatccgagagatctggaaaaagacagcaaattctgtgagagccttggcgctgacctgatcttccatccggaaccggaagaaatgtatcacgatggattcagttcttttgtggacatgacggttctgacagaggaactttgcggactgagccgtccggttcatttccgtggtgtttgtactgttgtcagcaaattattcaatatcgttcagccggatcgtgcatattttggacagaaagatgcacagcagctggcagtcatcaaacatatggtagatgacctgaatatgaatgtggaagtaatcggctgcccgatcatccgtgaggaagacggactggcaaagagctccagaaatacctatctgtctgcagaagaacgaaaagcagcacttattttgagcaaaaccatctttatgggccagaaaatggttgaagaaggggagacagatgcggtaaaattagtagaagcaatgaaaaagaacattgagacagagccgctggcaaaaattgattatgtcaaagcggtagacggtctgacaatgcagcaggtaacagaactgaagagtccggcactggttgctatggcagtgtatattggaaaaacaagattaattgataacttcatgatttgatcaaatttgtaaaagtagagaggaaaaagtttttatgacccttcagatgttaaaaggaaaaattcaccgtgcaactgtggtacaggctgcacttgattatgtaggaagtatcaccgttgatgaggatcttctggatgctgcaggtattcttgaatatgagaaagttcagatcgttaatgtcaataatggcgcacgttttgagacatatacgattgccggagagcgtggaagcggaatgatctgcttaaacggcgcagcagcacgctgcgcttccgtcaaggataaagtcatcattatgtcttatgcggatatgacgccggaggaagcaaaaacacataaaccatcagttgtttttgtggacgagatcaatcgaattgaccgggtgactaactatgagaaacacggtcagttattcgataaagcaagactggatgaggagtaaaaagaaatcatgttaaaaggaaaaaccgttgtactgggtgtgacaggaagtattgcagcttataaaattgcatcactggcaagtatgctgatcaaacagcatgcagatgtgcacgtgatcatgacacagaatgcgacaaattttatccatccgaccgcatttgagacattgacaagacacaaatgtctggtggatacatttgaccggaattttcagtttgatgttcagcatgtaagtctggcacagcaggcggatgtgatgatgatcgcaccggcttctgcaaatgtgattggaaagctggcgcatggaatcgcagacgatatgttgacgaccactgcgatggcatgcaaagcgccgatgctgatcgtgccgacgatgaatacaaatatgtatgagaatccgattttgcaggacaatttaaaagtactggcttcctatggaaaggaaatcattgagccagccagcggtatgcttgcctgcagagatgtgggaaaaggaaagatgccggagccggaagtactgttccagcatatcctgcgtgtgatcgcctttgaaaaagatctggcaggcaaaaaagtactggtcacagcaggaccgacacaggaagccattgatccagtgcgttatatcaccaatcattccacaggaaaaatgggatatgccattgcggaaaatgcgatgctgcgtggtgcggatgtaacactggtaacaggaccttgtgccatggagccgccgatgtttgtcaaagtaaaaccggtgatttcagcacaggatatgtatgaagctgtgacagaagaatatgagcagacggatatcgtcatcatgacggctgcagtggcggattatcgtccggcacaggtcagcacggagaaagtcaagaaaaaagaggacgatatgtcgattccgctgacacgcacgaaagatattctggcaacccttggtgcttctaagacacatcagttcttatgcggtttttccatggagacacagaacatgctggaaaactccagaaccaagattgcaaagaaaaatctggatatgatcgtagccaataacctgaaagtggcaggtgccggattcggtactgatacgaatgtgatcacactgatcgctaatgatatggaaaaagagctgccgctgatgagcaaaaaagaggctgcaggttgtattctggataccattcttgagagaatgtagtgttacaggtcattttgcgaatggcgcgtgagaattgcaatcatatagtaaaaaagagaatttgaaaaagagagaataagaaattgaccgatccggaaaatgcatttttgatattttttatcattgatgtgttttccggatattttttacttgaaatataccctaagggggtatataataagcccgtattgatcagaaggattgaaataatgaaaaaaggaagtggatagattcgatggaaaaagagaaaactactccggtacaggaagaatcctgctgctgttgtcataagaaaaaagaacgtgacgcgaaagagtataaggatctgatgaaccgactcagccgtattgaaggtcaggtgcgtggcgtgaaaggtatgttggaaaaagatgcctactgtgtggatattttgacacaggtggcagcgattaacgcggcgttgaacagttttaataaagtactgctggcaaatcatatcaaaacctgcgtggtggaaaatgtgcgaaatggtgatgacagtgtcattgatgagctggttacaaccatgcagaagctgatgaaataaaggattctgctgtatatgtaattgagcagaaccgcatagataaagtttaggttgtgtatttgtatgacttgatgtgattctgatgaaagcaaatggataaaatctgcataagcagagaaaataaatgaggtgaatatttttatggataaattttcagtaacaggcatgagctgtgcggcctgcagtgctcatgtggaaaaagcggtggcgaaggtacccggtgtaacttccgttaccgtcagtctgctgaccaattccatgaatgtggaaggtacggcagcaccgtcagatattattcaggcggttacccaggcggggtatggcgcttctttgcaggggggagagcagaatacatccgcaccggcatttgatgaggaggcattaaaggatcatgagacaccaaaattgcggaaacgtctgatcgcttctgttgtgatcctgattccattaatgtatgtttccatgggacatatgatgtggaattggccgcttccgtcctttatggcgggaaatcatgtggccatgggattgtatcagatgcttctgaccattctggttatgatcattaaccagaagttttttatcagtggatttacaagtctgctgcataagtctccaaacatggatacgctggtagcgcttggctccggtgcatcttttgcatacagtacttacgcattatttgccatgaccggcgcacagatgcggatggatatggatgctgtaatgcagtacatggatgagttttattttgagtccgcagcgatgatcctgacattgatcacagtcggaaaaatgctggaggcttattccaaaggaaaaacaacgaatgcattaaagagcctgatgcagcttgctccaaaaaaagcaacgattctgcgggacggcgaggaagtttctgttccggtagaacaggtac

SEQ ID NO: 13306 - DNA, 1295 bp, Unknown
  gut microbiota DNA sequence
tcgtccgggcgagagcgttccggtggacggtgtgatcattgagggaaacagtgcgttaaatgaatctgctctgaccggcgaaagtatcccggtggacaaggcagagggtgacagcgtatctgcagctactttaaatcagtctggattcttaaaatgccgggcaacacgagttggaaacgatacaacactttcccagatcattcagatggtcagcgatgcggctgcaacaaaagcaccaatcgcaaaagttgcagataaagtatccggtgtttttgtgccggcagttatttctatcgcaatagtgacaattattgtatggcttttagttggtcaggatttcggttttacgctggcaagaggaatttccgtactggtgatcagctgcccgtgtgcattaggtcttgcgacaccggttgccatcatggttggaaacggcgttggtgcgaaaaacggtgtgttatttaagacagcagtatctctggaagagaccggaaaagtcgatattgtagcattggataagaccggtacgattacacagggtgaaccgaaagtaacagatatgataccgggtgagggtatcacaaaagacacattaatgcagaccgcattagcattggagttaaagagtgagcatccgctggcaaaagccattgtggcttacggcgaggaacagcagattaccgtttctgccgctgatgattttcaggcaatgccgggaaatggtctgtcaggaattgtttctggtgcgcgtgtgtttggcggaaatctgaaatttatttccggaaaaacaaccgtttccgagcagatgcagcgtcaggcagaagaacttgcaaaacagggaaaaacaccgctgttttttgcaacagaagagaaactttttggtattattgcggtagcggatgttatcaaagaagacagtccgcaggcaatttcccagcttcagaatatgggaattgaggttgttatgctgactggcgataatgagcgtactgcggaagcaattggtgcgcaggcaggtgtagatcaggttattgcaggtgtcctgccagatggtaaggaacgtgtgatccgtgaattgcagcagcgtggaaaagttgccatggtcggtgatggaatcaatgatgctccggcgttaaccagtgcggatatgggaattgctattggagcaggtgcagatgtggcactggatgcggcagatgtggttctggtaaagagcagtctttccgatgtgccggctgccattcgtctgagtcgtgcagtacttcgaaatattcacgaaaatctgttctgggcgt

SEQ ID NO: 13307 - DNA, 3065 bp, Unknown
  gut microbiota DNA sequence
atcatgtactttcaattttcgaactatttcatctcgcgacagttccgtccgaaatatcaaatcctgtcccacatttttatatgttccattagaatatttcacatatcttttccaacgcatgacaataatcagtacggaacagactgccaatatacaaaaaaatatataaaatactggaatcctgttcatcatgttccctcgctctgttttactaatttttcgccatctctttccaatagttcttcaacatttccagtattcttttggcatcatcaatttccgttttctgattatattctcccatttcactgaaaattccggattcacttacaatccccaataaccatttccccaatagattctttttatacttgaaaaccaaacaatttataccgtcctcatctgcaaatgcatttgtatattctatcttcgtcggtttctttcccaattcacttggatcagataaccaatcttccaattcttccattgcatttttaattgttttgttcataaccatacctgccttgtccccctttttctgttctggccttctaatctggtttttgcatagatcacataaacgcttcggtttttttaagctccaaaaactctttacctgccgctgcttgttactttcattttaccatactgcctgcctttttccatctatatttttggcaaatatggtgcattgattactctgataaatattcctggcttttgacataagttgatataattatgtgtttttagaaacaaaaaagagtacccacatctttgtgagtaccctctcaatatagcttctgcttatttactttgtgttttgatcactgaatgtttagttcaccgatcagttttctcccatcttctgtccgctgcatttttacggcatgatgatgaaactgcacgatttctccaacatccacactgattctatgattctcccattcgctctccggctttggtggcaacggttttccaagaagtggtacaatgattttcggatcttcgctttgctccgaatgccaaaatcccgtagtttcataggttgtatatacctcaacctcatcaatatgtatcccaagcacccgttccaatgcgcagacgttaaaatagctggcacgcgttttttgctttatctcatgccactttttatcatcaactttacttttcatttcgatcagatgcaagatccattttccatcttttttctggagcaacacatgatctacacttctttgtaatttcaggggactttcacgtttaaggaaattacacttccctttgtgatcataatcttcacagcataagttatctccctgaatggtcacctgcagctcgcttctgccagattcgctcttttcctccaagcagtaagaatcattttccggaaggaaaaaatcttcttccaaaaacttctcaattccatatgcaatccgttcttctaccatttatcagtcctcctgaaatgcatacacttcctctacaatcttttcgagggcattattgaatgtaggcacaacgaatccgtactttgttgcttccagcgcttctaagtgtgtttttccattattgtctggaacaaactgatacatctgaacatcttctctggaaagcagatcttctttccggtatccatattctttctgcagttcactactccgcacatggtttttcaatttcatcatgttattgatatgctgtaaaatcgtatcactgtgcgtagtgatccataccggaatcccaagattcatcatattaataagcaatcgtgccattttctgctgcaattctggatgcagatgtgcttccggttcttcaatgatcatcgcattaaaattgatcccggatttcagcaccaacagcagcggagaaatctccgaaacaatggaagatgccacatacagtggaagctctttctcactgccctccggttgatatttgatcactggcatcatatctttctttacggacagatttccctttgtcatctgcttttcaatatattcgatgatctttgcatactttttgctgtcttttttattgatttcaaactttgttatcaactgcaaaaaatctacatacggaagtgtcagggtacttgtgttatcctgcaattccggtgaaaaactaatctgcagtgaattttcaatcaactgggcatacgtgagcataaatccggttcttgatgccggtaagtaaattggttcaccattccgtctgccctttacgaccggcgtataccatggtgctgcaattccttccattaataaattccagcagatataagcattcatacggagtaattcttcccggtttgccgcttccacttctgggaatttaatatatccgcctgtgacagaatatctggatgcagacgcatcccaaaccatcttgatcggatgattcctctcataatgtgtgatctttagtttttcaatctcaacctcatagttaaaaattttttttaccagagcttttttctgtgtactcagtaattcattaaaccaggttatatacaggtctatcgcatcatccgtcagtgcagtttctgtgttaagatgttcttttaaccagctttcgcactgcttgtatgcctttgcttcagagggcttctttgggaaaatatctttacctaacgtcaatattccccataaaatactcatcaaataactttttccgctattgttatcacccacaaaacacattaacggtgcgatcgtaacatctgcactttttatttttgcaaaattttcaacgtggagtgtccattttttatccattcccgtctcctctcccatcaggttgcttttttgctctaggataacccctgttttctgcctgacatctttatcatttaatactaccatatgccatcccttttttcaaattattcgcacatcatcatagggaaactgccgcttccacgaacaaacattcatggagcggcagcttcatttttccctatatgacagtttttagttttctttcattatgcgctactttccgcatccggttcccatccataagccggaatcctagataggagtttctacgctccatac

SEQ ID NO: 13308 - DNA, 1432 bp, Unknown
  gut microbiota DNA sequence
ccttttgtaatagggataggatgaagtcctatttagttgtgcaaaataaggcatcttttttgttttatatatatctaacaatgatatataacatagaaacagtaataacgatcaatgttgccggaatggagtacttacaatactgtttccaggaaatatgatgaccgtttttggatgcaacggcaatgccgacgacattcgcagaagcaccaatcggagttgcgctgccaccgatgtcagtgccaagggcaagtgtccatgcaaggacggacagatctgcaccggaagttgcagcaaggcttttgatgatcgggatcatcgtagccgaaaatgggatattatcaatgatcgcgcttgctacagcggagatccagataataataattacaataaaggtgatatttccgccactgatcgtatgaataaaggttgcgatcagttcgagaataccggtttcttccagaccgccaacgaccacaaataagccggtgaaaaatacaagtgtcggataatcaacacgccgcaggattgctttacttttcttacctgctgtgatgcaggtagcagccgcggcgatgatgccgatggtggaaaccgtcaaaccggtctgcccatgtgttaccagcagaatcacggcacagagaaaaataactgtgctgatgataaatgcacgtttatttgtgatggcactctgcggtgtcggcattttttcgatttcttcttcggaaagatttcgtttaccaagttttatacgaaaacacatgtaaaagaagaaaatcatcaataccaggcagatgattgcgattacgccggtgttggtcaggaaatcggtaaaagtataatgcagagccgttccgataatgatatttggcggatcgccgcacatcgtggaagaaccaccaaggttcgaacagaagatttctgcgataatgaccggaatcggatcaaactgcaatagtttactttgggtaattgtgattgccgcaaggaataaaattacggtaatgctgtcaataaacatagacaggacaaaggcaaggatcataaacatgataaaaatctttgtcgtgttgtatctgactgctttggcaatggtcaggcagagccaggagaaaaatccggaaagtgccattccttccaccatgatcatcataccagcgatgaaaatgatggtctgccagttgattccttttgtgctttctgtcgcttccgcccccgcgcgccagaaatcaacagatgtaaaagtttgaaagttcagggtgtcccagagtgcagttgcactgtgcatacagacaccaaagacgagaatgatagtcgcgatgctgcagatggtcgtggctatgtgccgtgggattttttccgtgatgatcaatgcaaacatgatcaggaaaataataacggctgtgatttgtgctgccataaatacctcctc

SEQ ID NO: 13309 - DNA, 926 bp, Unknown
  gut microbiota DNA sequence
catgatgatatcctcctgatttttgatttaattttttattgttttttcgttgtaatcttattggttacatctgatatttgcatattatcatggttatgttgtaatgtcaatagttacatcttcattttttatacatttgtaaaagaatacaattcctgttgatatattgaaattatttttctctttattataataataggtagatcacatacaaaggagagtcacactatgagttatgcattagcccttattgggttcttgggtttctttatcacaaacatctacatgattatacaagcagtaaaaaagaagtttcgaaaaaaattactgcttccaccacttatatgtttcatcttgtttattatcggcgcaagcctgatgccttcttctacaaaagtagccataaagacgattcaaatatcgcttgaaaatcaggagacagaatatgatatcaaccagacaattcctgtatcaatttctgttgaaccatcggatgccgatatttcagatttgacctacatttcatctgctggtaaatcagatacctttacatttacggataacaaaatcgaaacaggaacagccgaaggctcttatgaaatatacgtcaaatgcggcgatatcgaaagtaataaattatcaattaccgttgtagatgtcgcagccagaaaagctgcgcaggaacaggcagaattagaaactcaaaaacaggcggaactggaagctcaggaagaagcccaaaagcaggcggaactggaagcccaacaaaaagctcaggaagaagcccaaaaacaggcggaattggaagctcagcaaaaagcccaggaggaagctcaaaagcaggcagaactggaagctcagcagcaagctcaggaagaagctgcagctgctcagacggtagtgtaaattattctgtgtaaacctct

SEQ ID NO: 13310 - DNA, 1627 bp, Unknown
  gut microbiota DNA sequence
agtcattatcccggagatattacttatggcgatgcatttgaagaattttttacagatccatcctggaaatattttaagggaagtcaggaaggaccggatgatgatggcgatggtgagccggattataccattgatgacattgatgttgttgaatttacaggtggatgcacgtatcaggatgttgaggtgacagcactaattcagtttacattggataaagaagaagggacttttgaggctgtttacttatcttttaatgatgttccacagtctacattgatgttggggggattgcttagcaccgtttttgaaagttatatggaagcgcataatattcagtcagatgatagtgctgatacagacatgtccacagacaatgctgattcagacaattatgattcagacacaaatgattcatctgattatacggtgtcatcagatgattatgattacgaggcattgacgtatgccggttcttacagcggttatggtggatatacaatcaactttagtgcatatacatctgtagacagtgatgaaatcggtgtggctgaaatttattataatggtgaatttgaaagtagacagaatgtttacctttgtgatgatcctggtgactgggatccttccatttatgatgcattttatgtaattcatatggatggttatgatgagtatctgggattctatgaagatgatggcacgatcatacttgattacgatggaaatgcccataatctagatactttggaaatgacagaacattacgaatcatagcaaatggtaacatgtaggtagtgcagatataagatggaggataagatatgaagtgtaaaaaatgcggagcagagacaaaagaaggcagtaagttttgcatggtctgtggtgcaaaaattgaggaaacagaaaagaataattctggtggagaagggggttcaacgtcagagaatcatgatgaaaagaaaaatggtaataaggtactggaaaaaatcggaaagataataaccggagtattatctcttatttctgtgatcatgttaataggtgctttctttggggtttttgataaaaatcctgtcccatttatagtttttatggcagtcgtattgttttttggatggttggaagataaattccctaaaattccgattatcgtgattgcagttttggaaatcattatgttaatcgtttgttttaatgtagcaggaaatgccagtgcggtcgcttctgtaaaaggaggacatccttacgattacccgaccataacttatgaagatgcatttgaggattatttctctgatcctgcctggaagaatgtaggtgacgatgaagatggaaatgacgtagtaaaatttaccggaaagtgttattaccacgatgaaatagcaaatgttgaagttaaatttacattacataaggatgaggacagttttgatgtatcttctgtgaaaattaatggagaggatatgggagcattgaggaatgtattgatagtggatgtttttgatgagtatgaacaaagtcattaattacaaaggataaaggagaataggctgatgtgtattaaatgaaaaatatgcatcagctttttttttatacattatattgcgggaagaatatatagagc

SEQ ID NO: 13311 - DNA, 3370 bp, Unknown
  gut microbiota DNA sequence
cactgcgcaaccgaccggagcttttggaggatgcagaactttccagagcggatgtgaagcagattttaaaagaattaaaagaaaaatagacaatttttgctgaataggtaaggattgaaagaaaaagaagatgtcagcttgcgctgaccagaatcacgcaccaagtctcacgtgcgttcgacttgaataaaagcagttcctgcaaaaaagttgatgcatggactgcgaaaaatacaatagaaatgcagcaatttgtgttgctttttataaataagtatggtaaactatcatacgttgtgaattaaagaagagatggtcctctgttacgtaacgtattaagaacatccaaataacaggaggtcacaagaatgaacgcaaatgaaattatcaaaagcatcgaagctgagcagctgaaagctgaagtaccggagttttccgtaggagatacagttcgtgtatctgcaaaaatcaaagagggtaaccgcgaaagaattcaggttttcgagggtactgtattaaagaaacagggcggaagcaaccgtgagacatttacagttcgtaaattctccaacggtgttggcgtagagaaaacttggccattacactccccgaacgtagagaaagttgaagttgttcgttacggtaaagtaagacgtgcaaaactttactacttaagagaccgtgtaggtaagaaagctaaagttaaagagttagtaaaataatctgctttagaatgctgaatgatgataatcctctgaatgatgccttgcatcttcaggggattttttcgattacaggataaatggtgtgctggtacaggttcaatggcgaaagaatataaaagcacattttttgatttttataataaagaaatgtgctattgaaaagttttttatttgagtgatagcacacttccttgattttattgcagtattttcctatttatagggtgtttgaaagagatgttttctgttacaataaaaatgcatgtgcagattgtaatgcttcttagaaagatatacgatgataggaacttacattgagtagaaacatatagcgagtttcgcacatgtttgacttgaaattggtctgaaaggagataatctaattatgacagtgtttcgaacaggaggattgaatttccgaagaagacgcagaaaaatgaaaatatcgacggcaaaaggaattctgttgtggattgtagagatttttattgttctgctgcttgcctttgtgctggtatactgtgccggtatgagagtcagtgtagtgggaaattctatggaatcgacattaagcgatggcagtgttgtgctagttaaccgctttgtatacaatataaaagaaccgaaagcaggagatgtgattgtctttctgccaaacggaaatgagaagagtcactactatattaaaagagtgatcggagttcccggcgataaagtacagatcaaaaatggcctgctgtatgtcaatggcgaactgtatgatgtggaagacaccgaaaccatcaaaaatgcaggtctggcagaggatgaaatcacggttggagaagatgaatatttcgttcttggtgataaccgtaacagcagtgaggacagtcgttatgccaatatcggaaacataaaaaaggaatatattcaaggaaaagcctggtttgtggcaagaccttttaataaaatgggaaaaattaattagtagtttttagtggatgcaaaaggagaaaaaatatgaattttcagtggtacccgggacatatgacgaaggcaaaacgtcagatgcaggaagatatcaagctgatcgatctggtgatcgaactggtggatgcaagaattccgctcagcagcaggaatccggatattgatgatcttggaaaaaataaagcacgtctgattttattaaacaagtcagatctgtccgatgagagaaaaaatgaggcatgggcttcttattttaaagcaaagggattttatgtggtaaaactggatgcacgacgcagaaacagcatgaaggaaatccagaacgtcattctggaagcatgtaaggaaaaaattgagcgcgaccgccgcagaggaatcaaaaaccgcccggttcgtgccatggttgtgggaatcccgaacgtgggaaaatctacatttatcaatacctttgccggaaaagcatgtgcaaagaccggaaataaaccaggtgtgacaaaaggaaaacagtggatccgtctgaacaaagatgtggagttgctggatacaccgggtattttgtggccgaaatttgatgatcagatggttggactccgtctggcactgatcggttctattaaagatgaaattttgaatattgatgaactttctctggaactgatctcttacttgaaagaaaattatgcaggtacactgactgcccgttatgaggtagaagaaaatgtggagcgtccggtggaaattctggaagcgatcgcacagaaacgtggctgcgtacagcgtggaaatgagattgattacagcaaagcagcagcacttgtcatcgatgatttcagatccggacgtctgggacgcattacactggaactgccggaggcgaactaagatggaagtcagaaaaatcggtgagattaaagaagaattaaaggcaacaacggagacagaattacagcagtttattcagaaatacagtacagatgagcgtgctggtgtaaaaacagttgtaaatcaggcacagaaacgcctggaaaaatatgaaaaagaattgttgcgtattgatgcgctgaaaatctatgagcgcaaatatgcagattatgcatttatctgcggcattgatgaggttggacgtggaccgctggcaggtccggtggtagccggtgcagtgattctgccaaaggattgtaatattttgtatatcaatgattccaagaaactcagtgagaaaaagagagaagagctctacgatgtgatcatggaacaggcagtggttaccggtattggtatggcatctccggcgcgcattgatgagattaatattttgcaggcgacctatgaagcaatgcgagaggcaatcagtaaattagatccacagccggatttgcttttgaacgatgcggtgacaatccctgaggtagatatttatcaggttccgattatcaaaggtgatgcaaaaagtatctccatcggtgcagcaagtattattgcaaaagtgaccagagaccggttgatggtggaatacgataaagtgatgccggagtatggctttgcatcaaataaaggctatggatctgcggctcatattgcggcattgaagaaatatggtgcttcgccgattcacagacagagttttatacataactttatttaaattttatctcagtcgagaagactcccac

SEQ ID NO: 13312 - DNA, 9588 bp, Unknown
  gut microbiota DNA sequence
attgcttcctgaccgaaatcagctgcgctgtgatccttacgtttgagggcatagacctcatctataaaaagcacaccgcccatcgcttcttccactttctgtcttaccagaagtgcagtttgtccgacataacttccaacaagtgtcgaacgatctgcttccactacatgtccactttccaggtatcccatttcaaagaataactgggacactaatttcgctactgtggtcttgccaactcccggagggcctgtgagcacaatatgcagcatctcttttttctcatttggattatccaggtccggctgcaatctggatgccgtcagatatggaagtgcagccaacggtgaacggtcttttgtttcataggatgccagtgtttttttgaccattgccataccgatcagattgttaagctgttcttttgcagattccggttttttcatgtcaagcaattcatagcaattatctttatccagtagttttttcttttcaaatccaaggagtcttgtgtacagttccttgatacgaaccggctgctcacttaactgcaatgcctgatgaagtgccacggcgacttcggtcagttcactgaggcgaagcttcaatccgtaattcatcttcatatacataagcatatttttcagttcgatggcattcgggccgggaatattgatgatattcgcgtctttgttttctgcgttgatttctctcacttcatagatgttggccagatctttgtctgtgtaaatgaataccatgatattctgattttcacttccaagacgctcatagcccgcagtaagagaatgaagcggatcggaaccaaactcctgcaaaaatgtggtcggatcgttgatcacaactgcggttttgattgccgcattatacatgtaagcatccatctgacgtttcacaaaggtgttatctgtcattccaagatgcaatggtcctccatcggagttttttaccaacactccggaatgtgcaccgactttccagctctggttttcaactgctgtatccgccggctcctgctgtacagcaccttcctgtggcatatcggacggtggtgtggtatctgctgcagcactccccatacgatgtgcattccgtccacgtcttaatcctttttggaggcgcggttctgccgaaacacctgcatttgctttgcctggactgtcttccttcgtcgtcttggttaataatttaaaggattcatcgtcataacaatataacttctgatcattatcaaaaaatacaatacgttcatatccgtttcttttgagttcctgccagattgcctgctcaatgttcatttttatgccgctgtccatataaaactcgtctgccgtcttgccggtaataaaaaacagacgtttccatgaattttcagccgaaaaataactcgtatttgccattgtccaattctccttctctatcgatccttctcatccgtatattgtttcgcttacttggcagaagttacaggtgttttctgtgtacgtcttacacgtgatgtcacagcatctgtctgcactgctcccaccggtttcgtcgctctcactttctcatcgccacgctcaacagctgtcatatcactcactcttgctacttcctgtggtgtacgatctccataacgaccggagcatgcggagaaagagcatccctccagaccggcgcttctgagcttttctgcgacctcctgagcaatgcggtctcttgtcaccggattgttgtcggcatttccaacaatgagttcaatgtgattcgtcactacgccaccctcgtccggaatcggtgtgatcacaactgccacctgatcacgggtgaccggattctgaaagagtgcatgatattcttcgcggtcttctctggcaaaaaattcaccatccgcatccatcatctcgtagttatcgtccaaaatagcacctatcttggaagctgtttcataacggcttaccgacatcgcaacattgatgtgtgctgcgttttcaagcaacaacaactgttcctgcaaagaatgaagttcttcctctgcctcctgaagctgtggcagtttcatttcctccgcttgttctaaggaagcacggacagtcgcaatctgattacgcaaaatagtcaactgtccaaacgtccaataatcaatgccgttgttgtactggtaagtaccctcttctgtatcaatctcatagactctctgttctgcctcctccaatgcttccaaaagctgtctctctctcgtgcggacactgttgtattgatagttccactccaatgcggccagtgcaagctcctctttcatatccattgcaccgtaaaaggcttcgcgtcctgcggtaattgctgactgatattgaccgccttttacatcatcgcctgcctgacggatcttgcgatccagaagtccgatcttgcggtcatctaacaactgaggctgaaaggtctcacggatctgtgttaccatgcgtgccgcttcctgtgcccagtatactgccagttcacggtctcccatttcacgctctgcgatctgctgagcaagtgtattgacggttctgtttacctcattgatctgaccttccagtttgctgcttacctgagccagtgcacgggaagcttcttctttctgttcacggattttctgatctgtttcttcacgaagcagtgagatgcttcttctcatttcacgacgattgcggccaatctctgcctgaagctcctgctgcgcttcctgatgttctgtctccaggcgctgaacctgctgtctgtgctggcgctgcattgcctcaattttgttattctgtaaacgctcgcgttcttttacctgtgcatccagacgctgtactgccgcactcatctgactcacttttctgtcggctgcctgctgttgctgacgaatctgacgtgacagacgttcgttttctctctgtacacggcgtaacacattctctctttctcttctcaatgcatcacgctgtgcgcttgtgccattcaattctgctgtcagtctctcaattctatttctctgctctctgatctgtcgctgttctgctgtctcgtaataactcatatttctgtctccttttctaatgagtggtactctggttaaaatccgatctgttttacttttttaaacatatttttgggtggtactccgacgattctgattttttcctcctcgtaaaacatttctatttctgcgggctttgttccaatctgttttgcgtattctgcatatcggtctgtcagtggaatggcacgctgattggatgatcctctaaggtttttggaatcgtttaattcatctatgtacggaccatccaccagcaggtcacattgttccagtaacaagttgtaatccgggttatctgcctcctgaagttcttcaagggtaaatccggtgtagatcatcacgcccagatctgttttctttcgaacttcctgaattaagtctgccagtgctttcgcctgtaaaaacggctctcctccgctgattgtcagtccatgtctgccggactgtaaaatctcctctgccagctgtttcgtatctgcggaaaaaccaccattcatctgctgacttgccgctgtcatacatcccggacagctgcgggggcatccctgcgtccacacgacaaaacgtgtgccaggtcccagttttgttattccatctcgtttcgcatgcaactgaatcttcatagctttatacactccctgcctttcttctggtttcgattttattttgcagctctgccacatcctgactgacatttttcaggaaacggtcatagtctttcattaactgttctgactgctgattcattgcttccagcttattggaaaaactttcaacgttgacatatccatcctcacgaagtgcatcctgaattctctttaattctgtctgataagcagacaattcagcataagaatcttttgcgttttccacgttacgaatcatcttctgcatatcttcctcaaatgcagcgtgaatacccgccatcatttctgtttctttcttgtcaaacatacttttgtttgtgacataaaaagcattcattctctttgaaattccaatgtatccgggataaatattgtcgaatgtctctgctgtcatctcctcggtcaaagcattttccgcttcccgtaataatgcggaacaagttgccagaatagatacaaccgtttcttctgtatcatcttccaacgcaaacagctttgcctgtcgctctaactgacgttttaataattcacgtttctgtacattcatctgtctctcaccttcctgttctctgttttgtccgatcagctactattctaaacgaatagagtgtgtcatctcgtctgcatctgaagcggtatgtctgcgaacaagcaaggtatctgttccctcctgtttttccagtcccagatccaataattccaacggctccgtcaaccatgtatccggaagtgtgtattcctttttctcatcatcgatacgaagcacgatggaactctttggacggaacaaaacgggttccagataagacactttctgcacgccctgacctttttctgctaaaagtaaaaatgattctgactggctatccggatcaaaaacaaccagcttataggtatggtgtgcagcgtgtttgtctttttctaagttcatgccgctttctacaatctctgcataggaaacgtccaatccttcattcaggaaacgttcatccggaagcatggagtccgcggaaaagaaatttctgatctcatacattacccagaacagattctgtgcctgtcccagaacaacaattcctgtgtctgccaatgtcgcttcatcaatctgtgctttgatccggttcataaggtttttcagcatttcttttaccggctgcattgcgttttcgaatgcagcacaggtaatcttactttcgggaaactgatataatgtcttatttactgtgcggtcagaaagaaaataattacgcatgatattgtctgccctggaacgctgtgactccagttcagaaacaatctgttctctttcggttccacctgccagtttctgtaaattttcgatacaaagatcccataaatctgtctgtgtggtatcccagttatgaatcagctttgtctctttctgatcacaggtacaaaaacctgcggagcactgctccagatccagaatcagataatttctttcctttgtaacttctgtctgtgcggttgtattttcatatgcatacattgccgccgcttcgtatttggaaatatgttctgcatccatgtgttattcctccttactcatctcaaccttgacaactgccggcagcaccacatcgtcgtcaacctgatctgctgcttttcttgccacaccaggcacgatacaggtaacaacgtgtccaccggtgcaatccgcttcgttttcaggaagatgccacaaagcgtcatacatctcacctgcttccgggtaatatacatacatgtctaatccatgaagggagctctcaaaacgatgtaaaaatgtagataatgttttttttaatttctccaattctttcagcatatttgttgatgtgccttctgcaaggagttccatacggatcagtggatctacattcaccagacggtaaagctcctgaaaattctgtgcgatcggctcatactccaccggatacaatgatttctgccaggaatgaatgtttgtgtaaaaatctgacttcacagtctcaagcttctcgatgttatcctccaatgctgcaataaactttgcctgaacagtgtttgtatttgcacacatctcatcatgaatctcagccgcacgtttttcttttgcaaaataattttctaaccactgtcttacatccatatccacttctctcttgtaacagatctgtctgctgttcagatattcatccagacatttttttctctcatcttcacttttatcgcgttgttctctctccttacgtacttcctcctttgcttcatttctgattttttctgcttccgccttcgcttcgttgatcagcttgtctgcctctgcttttgcctcgttgattacctgatacttgatctgttctgcctgtacctccggattgattaacataacttttacctctctgagttccttggtcatctctgccagcttatctaagatatttttctcatttgttacaccgccataataatttccaaatgccatttttcattcctccttctattcatctgtcagttttttccactcatctgtagttgattttgtataatgttcgccgttatcactctggatatctacctgcactccgtagttttcctgtgctgttaacgttaagttgtactttgttcctttttttacgtgaaatggaatccaaacaatgccgtcacagttgtgttctgcatctgtctccagcacctgattcttctctttggactggaaaaccttgatcacaattctggatgactggctgacaaatgagatgggttctgagcggaacggtcttgtctgtccactggttaccagaaaacgaatctcgccttccagcttgccttctgatggataccagatgccatagcagcggtcggtctgctgctccagtactggatttgtatttttcacattgtcgtcttcttcctctgtaaccggttttttttcttctgtttctatttctttgttttccgattcctcctttgtatcttccttatgtgcaacgccatcgccatatccaaagcgggatgcaccggcaaaacgggatgcaccgaaagacactgcctcactcggtctgtgcatgatgatcggatatttatcttccaccagtttttccagacttgtgcggatcataggaactttgcttccgccgcccgaaagaacgattgcatcaattgtgatccctttttcttccgcttcctccagcatcttctgcacgacttccagcgtctgaaataccagcggctcgctcagcttttcaaagcgttctctggtgatctccacctcacagtattcattctgctgattcatgacagatgccaaataagagttatcgtctgtcaaagcaatttttgccttgacggcttcacgcatgatttccgctctctggatctcattctgaggttcaaatccatactgtttctgcaatacagataaaagttcctgatataagacgttgtcaaagtcttttccaccgacttcctccagtccgtctttcgcatgcattttgtacggagttccctcactttgagccgtcacgatagcagtatcgaaggtcccatgtcctaagtcatataccagtaccgtaaactcatttttcttgatgcggatctgctccggcgcaatatgctgcatgtaatggagataatcgattgctactgctgcaggctccggcagtctgctcaacacctgaatcggttttccatttatctcaacctttcccagattttcctgcatgatttccaacacaggcacattgtcggcaaatgctgcaggaaatgtgaacaccacgtcataaaccggtggaatgcctttatttgcaagctccttttctgccaacacaagcagatcatgtgctgctgccgcataaatgtgacctgcctgtaccggtctttcaattcccggaatcttaagtgtgagttccggcaaacgggtttttgccgcatacacaagctgctgtggggttcttgcgtatttctgttctgctgctctgccatcagaaaagacatcgatctgttctccattcggcggcttcacataggctgttgttggcattccctgtgtggaaagggaagctggaagcagcggaatcggatcgttcttcgggttttccaacagggatacatagccgtatccattaccaatgtccaatcctaatactctgtttttattctctgatttttctgatctggccatcatttatcctcccgtttttatgatttactaagatttttcagttccacagtactcttgatcggtttctccgggtgatctgcctctcgcgcttcaatcgtcagtactcccaatttatcaatacaaaggcggctctcgttgcgggtgcctttcgggacttctcttccatgatccagagagactttcatgatctcggtgtaatcctctgccacctgttctgaatccggatgtgccttatttgcttcgtaaacagtaaatccggaatatctctgatcttcatggagtgtcgttgaattctggtaagctgcctgatacggaatcggtgttcctgcagggatataggtagaaatataaccgctctcatcatcgacactatgataaaatcggattccaaggtcatatcctactcgtgtctgaacaacagaagcagcttctgccttttcagcaatatcattcattgcttctgctgtaccataacgtgctgcaccatcggcaatggcacggcttggatttgaaatctggattttatcttccttgtgtttcatttcatcccccttatattccggaaatgcctcctccaatgcgcgtttgaccatcggcatctgacttgctccaccggttaagataattgtctccggcttctgattggaatgtctttcaaacatttttttggtcgcttcaatggttctcatcagcaactctctggaagcggtctcaaattcttcacgtgtgacacgtaccgtcagatattcgttgttataaagcacttccgcatctgcataggcatcgaacgttaaatccttttttatcttctcagcttctgcccgaagtgcggctttgtgagacgggttcaatggaacctgcagcttctgttctattaactggtacataatttcatcaaactctccacctcctacatcttccagaccgtctacggccaaaatgtcataataataatctccgtcaccatttgttcttcccttgggatacaacgcaaccagtgcaagatcgaaggttcctccacccaaatcgtacactaacacggtggtttctttgtcagagccaaatctggacagataatccagtcctgccgctgccggttccgcaatggtgccacttacatgtacctgtgttccatcggcaagagatgccttctctgccagttcgatcagtctctgtctctgtgcgctggtataagttgccggatagctcagggcaatctcatttgttgtcatctgccagcctgactgaagctttttattcgcagatctcacacaatgctgaataacctctgtaattgcttcatcgtaagaaatctctctgccatccagtgtcattgtttctccaagatgacgcttcaggcggttaattctgttttgcacaggctttgcgcgtccacgcactgctgtttctccacaaagagtacctgctgcttttgaataaaagaacacgctcgggattccttcatttaatccaccggggagcagatcatgtacgtttccgccaagtctggttttaccgtcaaaatctgaaatataactcaggaaggaatagcagttaccaaaatccataccgatcactggtttatttttttctttattatttcttgccatttcataaactcctttatgatgtttttctgtcgtttttgtttcttatttatcagttattgtgtagagtgcagtgattctgaaaagaagatgtca

SEQ ID NO: 13313 - DNA, 1973 bp, Unknown
  gut microbiota DNA sequence
tctgaataccgttttcagggcatatcctatttcaaacagtatgagcagtatcggcataatgccattaatcaatactccggtatgacttacaaatgcttctgcaataaaagcgtgataacggatacagcttgccacaaacagaatacctaacgctactgcccatccaatcagaaaacgtctgattgccatccagatttcccacatctcataacccattattaccacctccaaaatcgacttctgattctccaacgcaaacggagaagcaggtatgctatcacagcgatcacaacaaatgcgatcacaccataggaacagatttttgctgcaaatacggccatcgccgccataatccggttcaggtttaccaccatcacaattgccaggatcacagataaaattcccaggattcttgtcacaagctgtgccggtgacaaattacggattccagacattctgcccaatccatttccaaaaatatctcgtctacgtctcatttttcatgttcccctccttatttgttaactgataccttgctccggactgcataaaatcttccaacggaaccagaaaaatgttgtcactttccatggttttcactgccagataatcaacaactggtccccagcgggatggtgtctggtacaaatcattactttgcacacgcagacgctgttctgactggatctgccagttgactgctttttgaaaggtaaaaagcagatgcggcggtgtgcctgccgtcggtgccggaaaataatactgataggtactgaataatcgttctgacaccagatcggtagcagcaggtgtctgctgtggaaacatcacaacattgacaaatgccagatctgctgcctccgggagccatttcaccggattctgtgccagaaacatcagctcgatccgtccctgcattttttctctcagaagatatctcagtaattcatcttcttcattttcaaagatcatctcatccaggatcactctcagacgggttccctgtttcagacagttgtacagttcttctttcaaacaggtatttaagatctgataatctctggaagcggtatagaaagcaaacagtctaccatgatctctgatacctgttgcaaaactgtaacccgtatcacttccgggcgtatagacttcctcaaatacttcctccagttttccacagattcttctcagaacaatgcctgcctcatgattgcttctgatgttatccaccaccacattggaaagaccacattccattgcaacctctgagatcacatcgtcatcttcctgcagcagacctgccatagccggcagagaaaccggatattttgcagcaacgatatccagcaatgccgctgtataaatcattacttttccgattaaaactccgattcccattttctctgctgcaaggctgacaaatctctggatctgctgctttgacattccaagaaacggatggtacgttttttctgatgggcttgcaattctcacatttgaaaacgcgtcctgtgttctccgtctctgaagttctgtaaacacacccagatgaccggaaagtaaaatgatgggcatgtctgctttttccatacagctttccaccagattcaggatcatttcctgatcaccggctctctcaccggaaacaagcagatcgccacgtatgttctgaaaaaaactgcgattgtcaatgattccttcaaacacgtttctttttctattcaagagctcacactcgcgtgtaattcttcctctgttactcatgttgttctcctttcgatctctctctttggaacaatttcacaatatcgaattttttcccgtgcaaacaggatgttctgaatttccttttgcaaccaaaattctgaaaccccgtaattttttgaaactttccgccaaaaggggacaaaaaaagaagcgaaatgcttttcttcttgcatttcgcttcttccaattccagactttttctattt

SEQ ID NO: 13314 - DNA, 313 bp, Unknown
  gut microbiota DNA sequence
ggttggactggtgaacgattatgaaaaaaagtacggaataaaaaatggggagtatttattcaaaaataaaaaaggtggtgcatttaatggacagacattttcaaatcagatgattcgggagtgtaaggctcgtgggattgcctgtggagattatatctttagagcacacgattacagacataaccttgcaacttcaatgtacggaaatggagtttctatacaaggggtacgagattatctgggacattcaagtgagaatatgacaaaacagtacattgatttcatgccggaacgtattgtatcggctgaagat

SEQ ID NO: 13315 - DNA, 16015 bp, Unknown
  gut microbiota DNA sequence
cggcagtcttggattggtcatgatcatttatgcatattcttatcagatgcatcagatactgaatatgtattccattgccatcgagatcatgcggggaattgcaggaaccatcggcattatccttacggttccgatcacgtccctgatcatgtcaatgctgctgaccagagagaaaaaagcagcaccggaaaagaaacaaaaatgtgaatgtaaatagaatgtaaaaaatttacaaagactttacattcgaatctcctgaattttacatacatcaattagagtggtaattgttagatgatgttattacttaatgacagttcaattggaaacatttgcagtattaaaaaaaactcctcatgcgagcatgagcgttttcttaatatatgtgctgagtgaactggggagaaaaatcaggaggaatctttttatggacatatttgcgattttatcgttgattggcggacttgccctgtttttgtatggaatgaatgttatgggagacggtctgaccaaggtttccggtggtaagctggaaaaaattctggaaaaactgacatcaaatccgatcaaggcggtattacttggtgccggtgtcaccgccgttatccagtcatcatcggctacaaccgttatggtagtcggttttgtaaactccggaattatgaaactgtcccaggcagtcggaattatcatgggtgccaatgtcggtaccacaattacatcatggatcttaagtctttccggtattgagagcagcagcttttttatccagatgttgaaaccaacatcattttcaccgattctggcaattatcggactgcttttgatgatgtcatccaaaaatgacaaacacaaagatgtgggaagcattttacttggttttgcggtactgatgtttggtatgaatgccatgagttccgcggtagagccactgaaagatgttccgcagtttacacatcttcttactatgtttacaaatccgatccttggtatgctggcaggtctgattttgacagcaatcattcagagttcttccgcatctgtcggtattttgcaggcattgtgcagcaccggagcggtaagttttggatgtgcgatcccaatcatcatgggacagaacatcggtacctgtgtaacagcaattatttcctctattggagcatccaaaaatgcaaagcgaaccgcgttagtgcatttgtattttaatatcataggtacagcgttatttatgatcgtattttattccataaatgcatttgtacattttgattttcttggagatgcagccacaccggcaggaatcgccgttgtacacagtatcttcaacatagcagctactcttgtactgcttccgtttgcaaaagtactggaaaaactggcgtacatgtccatcaaagaggatcatacagagcgtaagcatggtgtacaggagtctgaggaagagttgaaaaaactggatgttcgttttctggagcagccgggactagcaatcagtcactgtatggaagcaaccgcttatatggcacatatgagtgaggcagcattagtagatgcgcttggtctgatggatcagtacgatgaggaaaaagcggcaactgtggaaacactggaaaacagaatcgatcatttcgaggacaagatcggttcctatgtcatccagatcacaaaccgcaatatgctggaaaatgacagtgcaaaaatgtctgtcattctgcacagtatcaacgatcttgagcgaatttccgatcatgccgtgaacttaaaggaaagcgcgcaggagatgaaggagaaaggtctgaaaatgtcctttgagggaagttccgagatcatgtatctgcgcagagcggtaacagatctggtaaatctgaccgttcaggcactgagtaataacgataaggaactggccagagagatcgaaccgttggaggaggttattgacgacctcagcgatgagctgaaacggcgtcatgttatccgtctgaaagagggcaaatgtaccattgagatgggatttgtgctgacggatatgacaacgagcctggagcggattgcggatcattgttccaatattggtgtaagtattctggagagcagtgaggaggatatgggacgtcatgcgtatctgcattctgtgaaaaaagaagatacggagaatttccaggatcggtatgaacattatcgggaattgtatttttttgggtagcttaaaatttaccatttaggttttataatgaactcctaccattttgcctcagtcgctagcaatcactccttgaggaaaaatggtaggagttcttaagttacacagtgtttttgataaatttttgcgctaccctgcactgcgtgccgcacgacgtgcacttacacaaatttacatgtgtatataaattttgtggcaataaactacatgatgtagcatgcgttgaaccggatgaaagtcagattccaatggttatggatcgtatttttatggaatattataaaaaatgtgataggcggaattttattccgcgatatgagtatagatcaatactggaagataaagacggggatgtaaaaaaaccttcctgacagaaaaatcgcttagaccgtgagtcttaagcgattttttatttgctaggaaattgcgatgaatttcctagcaaacaaaaaatgctccgcgaggatgcgaccagatgcatgtggaatatgtctgctaaagcagactgcatctggcgcgcaaagcgtaacaagtccctcaaagattgagggattcagggagtttgaagcggacttgtccgctttattatcttgcctggcgtggagtaatgccatatttgtctttgaacttccgattgaaataagaagcattttcaaaaccggatttctgtgcgatctccaggatagacagatttgttgaaaccagcagatttctggcatgtgccagccggacatcattcagataatggatatagctgatgcccatatgtgtcttaaaaaatttcataaagtgtgattcactgaaataacaggcagaggcaatctggcaaatggaaatagattcttccaagtgttcatttgtgaaagtgatgatgaattttaacttgtccagtgagcgttgctgtatgttggataattcttttttatcgtccagagaaagaagctggaacatgaaaagaaacagagagcctttgagagcaagttgatatccggcaggttttttactgcataattgatccattgtccggatcagatcatgaattttcgggtagtaggacagacgtgggtgaatgtggacgactgtttgaatttgccctgagaacaatggatacagaaatttttcaaaacagacgtcgtggttatcggaggatagtaattccggacgaaaaatgatattttcatattccattttctgacctgaaatttctctgatggcatgcagatgtcccggaagaacaatgatgatatctccggctgtcacatgatagtgtgtcaggtctacaaaaactgtgccggatcccttctgaatgacgattaattctgcttcttcatgccagtgaacaggtacttccgtaaaatcatccggtatagtgcacagataagtgttatacggaaactgatcttccgtatgacgctttttttcgtggtattgttctggttttggttgtttcatgctggactcctttctgtttttgatagaattgtactataaaaggatattatgctgcaagaaaaaaataacaatgccgtataaaatataagcagaaacacacgaacaggaaaaagtatgatacaatgaatcaaatggtttcttcgtatcagattcttttgagagcacagactataaggtcgggaaggaattttattatgaagctggaaatgttagtatcggaaaaattaggaaaagcaatttcagaaagcagtaatcaggagatttaccaggcattgatggctgttgtgcaggatatggcagaacagaaggaatctaatgaaggaaaaaagaaagtatattatgtatctgcagagtttttgatcggaaaacttttgtctaataatatgatcaatctcggaatatatgaggatgtccgcaaaatgcttgctgcaaatggaaaagatatctgtgaaattgaggaaatcgaggcagagccatctcttggaaacggaggacttggccgactggcagcctgttttttggattcgattgcaacacttggttacaatggggccggtattggactgaattatcatcttggattatttcagcagaaatttgcggatcacatgcagaaagaaacaaaaaatccgtggatggatcgaagtggctggttaaaacgtacggatgtcggttttccggtgtctttcggcaatctgacattacagtctgtcatgtacgaaattctggtaaccggatatggtaaccgtaccaataaattacaactttttgatatagattctgtggatgagagcattgtacaggatgggatttctttcgataaaaaagaaattgccaaaaatctgacattattcctttatccggatgacagtgatgaagatggtcgcaagcttcgtatttatcagcagtattttatggtaagtaatggcgcacagctgattttaaaagaatgtgaagcacggggatgtaacctttatgatttgccggattatgcagtcatccagatcaatgatacacatccgacgatgatcatcccggagctgatccgtttattaattgcccggggactttctgtggatgatgcaattgatgtggtaagccgcacctgtgcatataccaatcatacaattttagcggaagcattggaaaaatggccattgcattatctgcaggaaatcgtaccacagctggtgccgattattgaaattttagatgataaagtacgacgaaaatatgcggatgaaagtgtggctgtcattgaccgtaacgatgtggttcatatggcacatatcgatattcattatggcttcagcgtaaatggcgttgcagctttgcatacagaaatcctgaaagagacagaacttcataatttttatcagctttatcctgagaaatttaacaacaagacaaacggaattacatttcgccgctggctgcttcattgcaatccgctgcttgcagatcagatcacggagtggattggtgatggatacaaaaaagatgcaacagagttaaagaagctggagaagtttgcagaggatgaagagtcactgcagaatcttctgcagataaaaaaagaaaacaaacatcaactggcagagtatctgagacggacacagggcatagaactgaatgaggattctgtgtttgacattcagatcaaacggcttcatgagtataaacgacagcagatgaacgcattgtatgtgatttataaatatctggaaataaaaagtgggaaattaccaaagactccgatcacggtgatctttggcgcaaaagcggcaccggcttatgtaattgccaaagatatcattcatctgatcctctgcctgcaggaactgatcaatcaggatccggaagtgagtccgtatctgaatgtggtcatggtagaaaattataacgttacattagcagaaaaactaatcccggcatgtgatatttcagaacagatttcacttgcatccaaagaggcaagcggaaccggaaacatgaaatttatgctgaacggagcagtgacacttgggacagaagatggtgcaaatgtagaaatccatcagtttgtcggagatgacaatatctatatctttggtgcaaagagtgatgaagtaattgcacattatgaaaaaagtgattacagaccatccgattattatacaaaaaacccgatgatccaaaaggctgtggaatttatcaccggtccacagatgatggagattggaaagaaagaaaatttagagcgtttaagcagtgaactgaaaaataaagactggtttatgacattcctggatctggaagattatatccgaacaaaagaacgggcgctggaagattatacagaccgcaaaacatgggcaaagaaaatgctggtgaatatcagtaatgcagggttcttttcttctgaccgtaccatccgggaatacaatcaggatatatggaaattgggggagtaatgtatgctgacaattctggtagtagatgatgaaaaactggagcgaaagggaattcgttttctgctgaaccggcgcagtgaagagatggaaattttggaggccgccaacggaaaggcggcctgcgaaattttgcagcatcggacagtggatattatgctgacagatataaaaatgccatttatggatggtattgagctggtttctgtggctcacaaattacagccagatctggaaatggtaattttttccggatatggtgagtttgaatatgcgaaaaaggcaatggcttccggcgtttcaaactatgtgctgaagccggtggatcctgctgagttcgaaaacacgctgaattttctggtggagagaattaccgagcggagaaatgaagcgcagcgcagtcagtggaatcaggattctctggaaaattatttccttttcagatacctttgtcaggggaataccgatctgttaaataaaatcagtggaaagatcaatattgaccgttgggatcagatcagaggtttgcttttaattgagagtgaagataatttttttgaagaatcagaagaagtttttattcaaaaactgacagaatatagcaagcagaaattatcttttttaaatctggcacagaatcaggaactctgtgtcctttttggcgtatgtgagcagaaagtttttgcaacagatttagctgaatggatgaatcatatgtttggaaatcgtttttatgtggcagtcggtcagccggttacggatcgaagtgaactgccggatcgttttcagatgcttgaaagtctgatagaaaataaattttatcagaaggaaacaagagtatttttaccggatcatgtagcagaagataccgggagtgagcagttcctggatgaaacgattagccggatgatggaaaatatccgaatggatgatatgactcatctgtgggaacattttcgtattttgaaaaatggtatgggagagatgagcagctattcgcagatttatacgagatttttgttttccaatctggtaaaagaattttttacgcatcagcatcaggacagaaaaaaactggaaacagcggttcagaaggtatacgaaatgcagtctgtccaggaagtgataagtcttgtagaaacactcatccagaatatggaagaacgtctggcagccaacaatgatggtgccagaaatgaagttgcacaggcaaaaagttatatttatgaacattacagtgaggatatcagtgtggaaaaattatccgaactggtgtatttgtcaccgggatatttcagttatatatttaagaaagaaaccggagatacggtcagccgttttattcggaattaccggatggagcaggcaaaaaaactgctttccgatacatctatgaagattgtgcagatatgtaaagaaactggtttttcaaatgtatcttatttttgtaaaaatttccgtgagtattgtgggtgcagtccggaacagtatcgaaagggtggaatgacagatgcgcagactcaaacagttctttcataaactatccattcgaaaaaagatgctgacaattctgtgtctggtcggtatgcttccggttatgatactgggtatttcacttggaatcaattcctatcacacagtgctgaaatacagggaaaaagatatgacgaatacactgcagcaggcctgtgggattgtagattatcagatgtatacctgccagcagatgatgaattatttcgtatacaatcaggatgttatcaattttctggagtgcgatccgacaaagaagacacagcgttatgaactgtatcaggaagtatcaaataccatcggtgcgttgaagtatcagaatctgatcatggaatctgttacaatctactccgagagcattcagcagtctttcggaaatgaaacgcatccactggaggatctgtacaaagagtcctggtatcgagatggaatcagggataaggaatgggtatttgatgaaagtacattagacctgatttcgatatacaaaattccaagttattccggaattgaaagttatgtggcagttcgcacagatattccgacattatttgaatcattaaaccagcttgcagtggatcagtatggtgttcatgtgcagacgcagaacgatgaaatatggaatttttccgggaaaaaatgtacagataaaaatggcatatatgtaagttttagagagaataaaaaggattatttatgggtgcagcaggatctgaatcagatggatgcgacagttacttattttcaaaagaaatccaacttaagtccattttccagaagagcgtttcttatgatcgctgtgcaggtaggagcctgtctggtctgtattattctgctgggaaggagatttgcaaaatatttatccagaccattggaagaactgacagaagaaatccagtctatggatgaaacaaacattcaggcaacagtccacagcaaccgcgaagacgagatgggaatcctgatcaacagttataatcatatgatgcagcggatccaggaattgatcagagaaaattatgaaacgcagattgcccggaaagaatttgaaatgaaagcattgcaggctcagatcaatccgcatttcctgtataattctctgtcgatgatcaactggaaagcaattgaggccggcgaagatgaaatcagtcaggtgacgcttgcactttctgcattttaccggacaactttaaataaaggaagaacctggatcagcctgcggctggcacttcaaaatattcaggcttatgtacagctgcaactttggatgcatgataatgactttaaagtgcattatgatgtagatgaaaaattgctggatcatgaacttccttcacttattttccagccgttcgtagaaaatgcgttagagcatggtcttgatattaaggaggatccggatcatcagatctggttccgtatctgggaggagacagattccggggtgatttatgtcagcattcgtgataatggcgttgggatggatgcagatacgcttgcacatgttctggaatatcatgctttgggatatggtgtcaaaaacgtaaacgacagaatgaaactgagcttcggggaaacttataccattcagatcaaaagcgaagagggaaaaggtacggaggtattactgcattttccaaaggtacagaagggagaatgcaatgagtcatagcaaaagaagagcacaggctatcgttatgggaatgatgtgcgtacttctcggtgtgatatcatttgaaattgactgtgatgtggcagaacaggaagcggatgaaaaggcagccacttcgtgggagaaagcagagaaatcaccactgataccctatccggagacagtgacctatacactggcaaaaatgactgcttccggtaattccggtatgccggatggcgatacttatgaggataatgcttatacacgatatttgaaaaaaacacttaacgtacaaaatgaagatgttttggaagtgtcggaggatgaaaattattatctgtatattcagcgaatgattgctgaaaatagtcttccggatgtgatgctggtatctggtccggatgaggtagagaaactggcagagtatggcatgattgaagatttatcagatgcttatcaagaggcaacttccagtatgatcaaatccatgtacagcagctatggaaaagaattactggaatctgtgaccattgatggaaaattgatggcacttccttccacgcaggtttattatggatgtaatctgttctgggtgagggaagattggcggaaagaactgggacttccggaaccttcgacgcttgctgatgtggagcagatcatccaggcattccgggaaaatgatccgggagaaaatggaaatatcggattgccatgtatggcaacattgtatgggaacggttcttcgaatttctctgtggatcctgttttttccgtatttcatgcctatccggggatatggctgcaggatagtgatgacggttatgtctatggatcattaacggaagagactaggcaggcactggaatatcttcatggatggtatgaaaatggtattctggatcaggattatatgatgcggacaccgggagaaatcggagaactgatacgtgataaccgctgtggagctttttttggctggtggtgggcaccgaataatccgctgatagaagcagtggaggcaaatccgggggcggagtggaaaccatatgtgatcgctgatgagtatggagaagttcattcttacatatatggaaaaacatctccctgtatcgtggtgcgaaaaggatatgagcatccggagatcgtcatgaagattatgaccgcactttttgacaatgcgcgataccgtcacgatgggagcgaagaaattgacctgtaccagaaacgtggggttgataccacggcacgtccgcttgtggcaaactgtgatttcagcaatgctgtgtttacaacaacagatcatatctggctggctttgcattatccgcgacagacagattccatgaattctctggaatcggcttattatgacagttgccgcagattccttgatggagacagagatcctgtttactgggctgcctatgcttcacggattcaggcagtacggctgattgaagaggcggatgtgtcttatgttaatgaagactatgtaccgtattcacatcgggagttaccgcaggatatgacagatatggagacactggcttttatgaagatcattacaggagaagaaccaatatcctattttgatttttttacagaatcgtggaaaaagaacatgattcttgaaaatcttttgtattaaatatgactctctttctataaaattataagtatcaaagaggtatgcacttgatacgataatgaaaaggaaagagggtattttttatgaaaatgaaaaaatttttggcagtgtgtctgtccgcattgacagtaaccggtatgttagcaggctgcggtggagcgaaaggtggagatacttcttccgcaggagctgagaaaaaaggaagcagtgcagaaggatctgtatattacctgaatttcaaaccggagattgcagatcagtgggaagaagttgcagcaaaatatacggaggagacaggtgttccggtaaaagtaaagacagcagcatccaatcagtatgagcagacactgaaatcagagatggctaaaagtgatgctcctactttattccagatcaacggaccggttggatatcagtcctggaaagagtattgtgcagatctgaaggataccgatttttacaatatgctggtagataaagaccttgcgatcacagaaggtgatggtgtatacggcattccgtttgcagaagaaggatacggcattatctataataaagaaatcatggataagtattttgcacttccgggcgcaaaagcaacatccatggatgatatcaaaaactttgatacattaaaggcagttgtagaagatatgacagcgcacaaagatgatcttggcattgatggtgtatttgcatccacatcctttgcaccgggtgaagactggagatggcagacacatctgatgaatcttccgatttactatgagtacaaagatgcaaatgtaaaagatgaggatgagattactttcaaatataatgaaaactttaaaaacattttcgacctgtatctgaacaactcaaccgttgagcctacaatggttggttccaagacagtagatgattctatgtcagagtttgcattaggaaaagctgctatggttcagaatggtaactgggcatggtctcagatcagcaaagtaagtggtaacgtagtaaaagaagaaaacgtgaaatttatgccgatttatacaggtgtagaaggcgaagagacacagggactgtgcatcggtacagaaaactacatgtgtgtaaacagcaatgcatctgaggcagatcagaaagcatctctggatttcctgaaatgggtgttcagttctgatgaaggaaaagagatggtaacaaatgatcttcagtttatcacaccgttcagcacatttggcgatgatgagatttcttctgacccgttagcacaggaagtagtaagatacatgaaagatgattcccttacaactgtaccgtggaactttacaacattcccaagccagacattcaaagatgattatggcgcatctcttcttgagtatgcaaatggcaataaagaatgggatgctgtggtatcagatacagtagatgagtgggcatctgagaaagaagcaacagctgagtagtcgtattagatagtagaattctcaggggcaggaggcggtcatcggccgcctcctcttctgttttacgaagaaaacatttgtatccgtagggagggagatttatgcaaaagacatataaaaaatattttgctctttttgtattacctacattgattgcatttaccctgtttttcatcattccatttattatgggaatcgtgctttcattctgtaaatttacgacagttacaaatgcacactgggttggaatcgcaaattatgtaaaggcattttcaaacaaagattttattaatgcactgttatttaccgtgaaatttacggttgtatctgtaattacaattaatgtaatttcctttgccctggcatatggactgacacggggattaaaaggaaccaatatttttcgaaccattttctttatgccaaaccttatcggaggaattgtacttggctatatctggcaattactgatcaacggcgtgctggcacattttaatgtaacgatcacagcagacccgaaatatggtttctggggcatggtcattctgacaaactggcagttgattgggtatatgatgatcatttacattgccggtattcaaaatataccgacagaattgattgaggcagctgaaattgatggtgccaataaattccagacattgtataagattattattccgatgacaatgccatctgttaccatctgtctgttcctgacacttacgaactgcttcaaactgtttgatcagaacctggcattaacagcaggcggaccggcaaagaaaaccgcaatgctggcatacgatatttatacgacattctacaacaggaacggctgggaaggtgtcggtcaggcaaaagcggttattttctttattatcgtagcagcaatctcactgacacagttatacttcacaagacgtaaggaggttgagaactaatgctgaaaaagagaaaacaaaacaaaaatgagatcattgaaaatccggcagtatcaaaaggtaccggtattgtgattacgattgtgatgacacttttagctgtggctttcctgttcccgattttccttgtattgatgaattcttttaaaaacaaactttatatcagtgatgcaccgttcgcattgccaaattcggatactttttccggaatgtacaattatgtgaatggtattcagaaaacaggactgctggtagcagccggaagatctgcttttattaccatctgctctgtaatcgtgatcgtgcttttgacttccatggctgcatggtggattacaagagttacatgcaaattatccacagtattgtattatctgtttgtatttgcaatgatcgttccattccagatggttatgtttacactgtctaaagtgacagattttcttcaccttggcaatatgtttggtatcataccggtttacctgggatttggtgccgggttgtcgctgtttatgttctgtggatttatcaaggcgattccgatttccctggaagaagcagcaatgatcgatggctgtacaccggttcagacttattttaaagtaatagtcccgatgctccgtccaaccatgatcacagttgcaattttaaatgcaatgtggatctggaacgactacctgcttccgacgctggtacttgacagtgaaaagccaaccattccaatggcagttcagtatctgcgcggtggctacggatccattgatatgggcgcaatgatggcaatgcttgtacttgcaattttaccgatcattgtattttatctgacctgtcagaaatatattatcaaaggcgtagctgcaggagcagtcaaaggttaacaaacgctcaaaagtcctttttgttacagcagtgcagcaaaaaggactttttatctcagtcgagaagactcccacttctgcaagtggtgagtaataacaagtctttctcagtgggagtacaatctccgactgagataaacgctccgcggggatgtgcagtgattctgagaagaatatgtcagctttcgctgaccagaatcacgcaccaagtctcacgtgcgttcgacttgaaaagtataaatgtgtagaacgtgaggatataaactatgagaacaagtggaattctgatgccggtattttctcttccatccaaatatggcataggatgtttttcaaaagaggcttatcaatttgtagattttttaaaagagtcaggtcaaaaaaactggcaggtactgccccttggacagaccagttatggagattccccgtatcagtctttttcatcttttgccggaaatccgtattttatcgatctggagcagcttgtggagcagcagcttttgacgaaagaagagtgtgatagttttgattttggaaagaatccggaatccattgattatgcaaagctataccagaaccgatataaaattttgcgtatggcctgtgatcgtttcctaaagcaaccgtcagatgatttttttgctttttgtcaggaaaatgactggtggcttggaaattatgcattgtttatggtaataaaaaatatgcataaaggagcaagctggctgcaatgggaagaaaaatataaaagacgcgattttgcagctctggaccaggtttggcatggacagcatgaggaaatacagttttatcagtttcagcagtatctgtttttccgtcaatggaaaaaactacatgcgtatgcggcgcaggcgggcattcagattatcggggacattccaatttatgtggcactggacagcgcagatgcctgggcagaaccgcagctgtttcaatttgatgaagagctaaatcctgttgcagtggcaggatgcccaccggatgcattttctgcaaccggacagttatggggcaatccgctgtatctctgggagtatcatcgccagaccggttatgcgtggtggattcggagaatcgcacagtgtctgaacttgtatgactgcattcgtattgatcattttcgaggatttgacgaatattacagtattccggcgggggatgagacagcagaacacggacactgggagccgggaccgggcatgagtctgatgcaggttttgaaagatgcactgggcgatgtaaatgtaattgcagaagatctgggatttttaacggatggtgtacgccggctattgcatgattccggtttcccgggaatgaaagtgattcagtttgcttttgattccagagaagagagtgattatctgccacataattatgagaaaaattgtgtagtgtatacaggaacgcatgataatgatactctttgcggctggtataaagttttagatccggaagatctgaaattatctcagaaatatatgaataatgcaaatacaccaaagaggcaaattcactgggattttatccgtctggcactggcgagtgtggcagatctgtgtattattccattgcaggattatctggggcttggaagtgaggcaagaatcaatacaccgtctacgctcgggaataactggcggtggcgaatgacgcagggatgtctgacaaaagaattagcagatcagatcagagagttgacaacattgtatgggcgataaatgagcatgacatttgtacagttaaaatatatatcagatgggagatgactcccacct

SEQ ID NO: 13316 - DNA, 6699 bp, Unknown
  gut microbiota DNA sequence
cctcaaactctgcaacggtcttgcactgggagattttctgaactacttcatcggaaagttccggaaggaaactgctgcggacaccttttaccgtaactttgaatgtagcttcttttcctgcaaactctgctgcatgataatcttccgggaatgtaacaaccacatctacgttatcatctttttttgctccaactaactgatcttcaaatcccggaatgaatgtattggaaccaagttttaacggaaaatcagtaccgtctccacctgcaaatgcttcaccgtcaatatatccgacaaaatcgatcactgcctcgtcaccaagttccgctgcaccgtctttgtcctgagtcgttaccgcatactgtcttgcacgctccagttctgcttttacttcttcctccgtaatgataatctctgctttttttacctctactcctttataatttccaagagtaacctgaatttttttctcgctcatcgcttcctccaaaagtattttcatttttcaaaatcatttttgactttgaatgtacgttttttctgatcagtttttggctttgcccagatcctcattctccagattgaaaaggatctgcctgtattttttcagccaaatgttattctgattcatacttttccaagtatacgatattttgcagcacatttccatcactttatgattttttcacatatttcgtcactatattctacgtttttggctatttttcctgaataaacatcaggaaaaatccaaccatcagtaaaaaactggaaaaccagattgtttgcaggttaaaaactggaatcagaatactgccaatacctgctccaaatgcaaataaaataatgattccaaaataatgaaaagctttgtacagaatctggcgattatgtgactgacgataggcacagagtgcttccattccgctgcggatatttccaatacacatggtgcttgcaaatgcataactgtcaactttacgaaacgtctgtacctgcatggcacaggaaaatgagacgaaagcatttgccaccagatccattttccccggtaaaaatccaaccagaaataacatgctcatttctatcagtatgacaatctgcctccagtgaattcggcctatattctgaaaatgctgacgaatttcagttgccgccgcaacaccaaacataaaagacagtaccggcatcagatatcgcataacatctgcccagtttcccgcaaaaatatgctggctgagcagcacaatattaccggtttgtgcatttgcaaatacatgtcctcttgaaatataagtatacatatcctgcaaaccaccggacacggaaagaaaagctgctgtcagaaacgattccgacatttgctttttcgaacaataatgcatccgtaattttttcatgtttcctcctaatccaaatcatcaggtaccataacgaaatgtttccccaaccaaaatcatcaggtacaataacgaaatgttttatctgtaagaattctggcaaatatcaaccctaacggtaacgcaaaaataatcagaagagctgatgcaaaccaggaagaagctactgacagatccatgtttcccagattataaactgctttatacagatacagtcccggaaccatgattacaatcgatggaaccgtaatggaaattcttggatatccaaccattcttttcaacgcagacgccagaactcctgcagcaactgccccggcaaatgcagccaccggcgccgggacagaagtgatatccagcatttccagtcgcagcgtattagatacagctcctattattccagccgcaacagcaagtttccatggactgttgaacataacagaaaatccgaatacaccgccaaagcttgcgcagatacgcaacacaatccactgccagagtccaaggctcatcgtagtaaatgacagcggttttaaccccagtaccatcgccagaacccaggctgtcatagtcgcaaccgatataataataacggaatacatcatccgttccattccggatcgcaaatccagttttgccagatcaatcccactggtaataaaagggaatcccggtatgataaaaagcatggcacagatatatcctgcctcgtgctccacttttacagcaaagcagatctccagtaatttcagcataacagaataagaaagacatgctgctgatattgacacaataatgcacaaaaacagcgtataatgatgtttcgaaagcttacaccggatataattgccaattcctgcaccggcaaaagcacacagcatctcaatggggccaccgccaagcagaaatgtaaaacaggcacaggccaatgctgctgcgactgccagtgtaacaggtgaatacaatccatgtatttcttctatcttatcaagtatcgtatgtatttcttcacagctttttgtaatttcccgttctttaaaatgcatcacaaacttttccaagcggttcagtttcgatgtatttacccccgtattcgtcaggcataacgactgactgaatgcatcatttccatcaaaacaggtataattgattgacatcagtccgatatccacggtacatgtcatatccagcaaagccgacagctcattcatggaactgcgcacacgccaggcacctgtcccacatgacaacatcataagtccaactctcccaacgacagatgccttagccggaaggtcagcgtcgacaatcgttttttcttcggatttatccgcatatttgtgccataaaatatccatatgattcttttttacaatactctgatcattgaatgtccacatacaatgcactcccactgagataaatttgttattactcaccacttatagaagtaaaacactgttatctgattacaaatccagactgtccgcaccagctacccgtatcatctgttctctgcaagacagcacaagtccgtcgatcatacttaaatgctgaagcattctgttttcaaactgatggataggtaacagtaccccaagttcatcaaaagattttccagccttacttccggtttcctgtccataataaacaattgcagaatacgctgctttctgaatctcttgaaaagtattccagaccacatcataagcctgagcctcggaaagatgtaattttttcgtatctggcatagcatataaaatcaggataccccgttcccttttttcctttttttcctcgatattcatatgttccgtatagtacctgaccatatcatatccgtctgccagatatagtttcgaacgtggagctgccacatgcgcctgatagatttccagaaatttcttatattcatgtctggaaacaacggattgctttgtattcaatacttttccattgatatctgtcaacagaaccggattttcccctgtttttccatgaaatctctttggaatcagataagcttccttcagcagatcaaacatgctgcgattacacaattccagcagaaccgcactgacatcaccattttcatatgcttttaacataacttctgcaaaatgtcccggatcagaatctataaaacgattatcatcacacagatggttataaaatgtctcactgagacgttcacatgcatccctggatgccagaatgcgtgaaaacattttctcaacttcctcttctcttggtaaaacaagtgacatacaatcatctcctattcattttttatgacagttgttttttctattcaagtcgattataataggaaatcagcaatcagtaaaagatattattgacatgcttattataatattttgatatatctgtttccgtcatcaactatcatttttacaggagatttcattatgaatgtaaattttgaatattacaaaattttttattatgtagccagatactgtaattttacgaaagcagcacatgcactccacaacagtcagccaaatattacgcgggccatgaatgctctggagcaggaaatccagtgcacattatttgtgcgcaccaaccgaggcgtacagttgacaccggaaggccagcagctttatgtacgtgtatcggctgccatgacacaattgcaggctgcggaagatgaactgacgaaaagtgcaagtctggaatatggcagcatttcaatcggtgccagtgaaatcgctttgaatatctatcttctgcatcgattacgtcagtttcatatagattatccaaaagtacggctaaaaattgcaaatcattctacaccgcaggctattcaatctctcaaaagcggtgaaattgatttcgcagttgtgacaactccattgaccgttacttcaccgctgattcaggtaaatttgcagccttttcaggatatccttgtcggaggaactaccttccgtcctcttcagcaaaaaattttatcgatttctgaattgaaaaactatccatttatctgtctgggggtgaatactgctacccggcatttttatgatgagctttttttctctcatggtctgcgtctggtcccggatattgaaacggccacgacagatcagattcttcccctggtcaaaaatgagcttggacttgcttttcttcctgagccaatggttacggatgcattacagaacaattctgtagtttctttgaaattgagagaggcacttcctacccgccaggtcagcattgtgtatgatcagactcatcctatgagcatggctgcacatcgtctgcttgaacttttgattcatgataaaatttagatctacgataaaaaaacagatgttccagacaaaaatccgaagcatctgctttttcgttaaggttttatataaggattttgaagaattactaaattactgaaattgtatcagcttattattactactattgccttttacagttaatcttgaagtgcatcataaccttctgcaccggtactgatcttaattgcattttctacattgtatacaaagatcttaccatcaccgatatgaccggtatacagtgctttcttagcagcttcaataacagttctaggagaaactttacttactacaatatcaacctggatcttaggcagtaagttcatatccatagtaacaccacgatatttgcttgttctgccgtgctgagcaccacaaccaagtacatttgtaacggtcataccattgataccaatggctgccattgcctcgttgagggcatcgaatctgctctgttttgcatagattgtaatctttgtaatgcttacatcgctgcctgttgcgatagacggatccggagtacgaacctgtaccggaactgcctcgtcgatcggcactgcattcttcggaagtttgaccggagttgcagatgagaaattgttgatgctggatgttaatgcgaagtctgcataagcacttgccagaccatgctctgtctgatccagaccgatgatttcctcttcttctgtaacacgaagaccaattgttgcacggattacaaggaatgtgattgtaatggtaactgctgcccatgccagaacggtaatgataccaaggcactgcagacctaataatttaacaccgccgccatagaagaggccgacaagttcatttccatttttatctgcgattgcataacccggagctgtgtttgtagcaaaaagacctactgcgaaagtaccccagataccattcataaagtgaactgcgaccgcaccaaccggatcatctacatgtaacttataatcaagaagccatacaccaaatactactaataaacctgcaacagcaccgattacgatggaacctgctgcatctgtaacatcacatggagctgtgatcgctaccagacctgctaaagaagcattcaaacacatggaaacatcaggtttaccatattttaaccatgtaaatatcatacaaacaaccgttgcaactgccggtgaaatggttgttgtaaggaaaatcgaacctaactgatcaatacttgttgctgctgcgccgttgaatccataccagccaaaccagagaatgaagcagccaaggcagccaagtgcaaggttgtgtcccggaatcgcgtttacttttctgatctttccattctcatcttttgtaaatttaccgatacgtggtccaaggagccatgcaccgatcagtgcgctgacaccaccaaccatatgaattgcacaggatcctgcaaaatcatggaagccaagctgtgctaaccagccaccgccccagatccagtgagcttcgatcgggtagatcaatgcggagataactccggaataaatacaataggataaaaattttgttctctctgccatagcaccggaaacgatggttgctgtagtagcacagaatactaagttaaatacgaaacttgaaaaactgaaattgctgtaggatgagaaaagatcaaatcccggttttccgataaaccctaacacatcttcgccaagtaagaaggaaaaaccaatcaggatgaacattacagtaccaatacaaaagtccatcaaattcttcatcaaaatgttaccggtgttttttgctctggtgaaacctgcttccaccattgcgaaacctgcctgcatccagaataccaatgcggcacctatcagaaaccagacaccaaatatgttgtcactaataaaagtcataatctcctgcgtcataacttacctcctggtttttggttctgtcgaaccatattttaaaacgacactcagaaaaagttttgaaaccttttctgt

SEQ ID NO: 13317 - DNA, 277 bp, Unknown
  gut microbiota DNA sequence
tccattgtgtcgctatcagagtttttctattgtccggtcattttattttggaaaacaggtaactgttgttcgcaagttcagttatctgtcatccaaaaataaatatcccggaaaacagaaaaaggcaccggaagcttattcttctcagcacctttgcctttgatgactgtaatattaccctcatcgtaataaaaagtcaataaaatttcttaaatttttgttaatttatgtaatctggcgaattttctcatattttggcactctttttgtgcaattc

SEQ ID NO: 13318 - DNA, 4621 bp, Unknown
  gut microbiota DNA sequence
acatgctgatatagcattttcactgccggtgcaaggaaattcgggtttaatgccgaaattccaatgacacggtatgcttccggcatcatcggataacggtctactgcgtatggaatgtcgttcatgaccagttctggcatgatgcagatgccaagtcctgcggccaccagtgcgatggtggacaggtcatctacaacgtggtagtccatccgcacgtttccaagtccgttctgtttcataaaaattgcaatatccgcatcggtggtctccatctgtgagacaaagacttcgtctttcatttcatctggtgtcatgtatggagtatcttcccgtttgcgatagccttttggaacaacgcagagcagaggatctcggtacagtggctcgattggcaagtctcccgcagaggacagggacagaaaaccgatgtctacaatgccgtttttgatccagtaagacacgtccgcataggttccctgatacagttcgatattaatgtccgggtaacgctgatgaaaggaatgaatgatgtctgtcatccagtttgtgcatacgctggaaaaacagcccacttttacatttcccattttcagtccgttcagtcccgcaattgcctgctgcaggctttcgtcactgtttaacaccgcattcacgtatggaagcagatgttctccatagttggtcagggctacccctgccttatttctcgtaaacagggaaaatcccagttcctgctccatcgatgcgattgcatgactgacagcagaaggcgtcagatttaatatctctgccgccttctgaaaacttccctgtcccaccactgtctgaaatacctgataggataacaaagtcatatatttattcctcccggattatcgtgcacacttatactgcagctcttcccagcgacggtcaacctcagcctggaactgtgcgatcagatcttcattgcccggtttgaacagatgtttgaatctgccctgttcacgtaaaaagtcttcgatcggcagttttttcttcggctcataagtcagacgccattttccgtgctcaacctcaaacattggccagtaacatgtctcaactgcaagtttacagattttcatgatctcggcagtatcataacgccatccacgcggacatggagtcatgatatttaagaaagcagcaccctctgtgtagatggctttctctgcttttttgtgaagatcggagaaattaccgatcatcgttgtctgaccaacatacggaacatcatgatctgcgataatagatgccagatcttttctgttctgcattttaccgttggactgtgttccaaccggtgtagttgtagtatctgcatacattggtgttgcggaagaacgctgaatacctgtgttcatgtatgcaccattatcgtagcagacgtataccatgtcgtgattacgctccattgctccggaaagggactggaaaccgatatcatatgtaccaccgtcaccaccgaaggtaatgaatttgaatgtggcatcttccggcagacggccacgttttttcagtgctttgtatgctgtttcaacaccacttaaggtagcacctgcattttcaaatgcattgtggatataactgtcttcccatgcggtatatggatacatgaaggaagaaacttccagacatccggttgcattaccgatcacggcctgatctccctcatgaagtgcacgaagtacggcacgaactgcgatggttgcgccacatcctgcacacattctgtgtcccggagccagacgttccggtttgctcataacttctttaaatttatattcgctcatcactctgcctcctactttctcagaccgatatactgatactgtgttaccggtttaccattttctacgacatctgccagttctgcaaagacatcttttgcatcttctaccgtgaaatcacggccgccaagtccataggtgtagttgattgcttccatataagttcttgtgcggtacagacctgctgtgatttcagaaccaagcggtccaccgtttccgttgtagctctcgcaacgatccatgattgccactgctttgcagtttttgattgcttctacaatctcttctgccgggaacggacggaagacacgcagttttaacacgccgacttttttgccttcctcacgaagttcgtcaactgcttctttggctgttcctgctgcagaaccaataattaccatgacataatcggcgtcttctgtcttgtattcttcaaacagaccatactctctgccagaaattcctgcgaactcttttgctacgtctaaaataacctgttttgcattttccagagcgattaactgattttttctgccttccataacgtagttggaaactgcatacggtccgacagaaaccggtttgcccggatttaacagatactcttccggatgatattctccaacaaactctttgaccggagcatcctctaataattcaatattttctactgcgtggctggtgatgaaaccatcctggcagaccatgatcggcagacggacatctttatgctcagcaatgcggtatgcctgaatgaagttatcatatacttcctgattgttctctgcgtaaatctgaatccagccggtatcacgtgcacccataccatcggtatgatcacagttgatgttgatcggaccggacagggttctgtttaccaatgtcagagcgatcggcatacggttagaagctgccagaagcagttcctcccacatcagggccagacctgcggaagaagttgcagtcagtgttcttgcgcctgctgcttctgatccgatgctggcactcattgcagaatgctcactctctaccgggataaactctgtatcgatctcgccgtttgcgatgtatgtggaaaccatctgcggaatctctgtggacggcgtgattggaaatgccggcataacatccggatttacctgtttgattgcgtaggcaacggcctcgttacctgacatacgttctttgattcccattattctacgccctccttcattttgattgctccaaacggacatacatttgcacagattccgcaacctttgcagtgatccagatcaaatgcgcctctcttctgattttttaccggaatggaactgtccggacagactggtgcgcacagcagacactgtttgcaattgtcctctaaataaactggtgtattgtttctccactcaccggttttgaaatatttggatgttcctgcagcaaatacctgcattccctcggtcagccctgtatgtggagtatgttcattgattttattaatatctgttctcattttctgtctcctctatgcttcctctacggctgcaaaagccatctccagtgctttcatatttccatcgataacttccggtttctttgcaaatttatgtttgtaagaagcacgcatctcatgtaaaaatgtctctttcggcataacacctgtggttgcaacaactgctgccagcatcggggagttcgggaaatattttccaagtgcctcctcggaaatggttctggcatcaatggtaaccacgcgaccttcgtatccgtttaactgcggcataatttcttctttggattttgcagtattgacaatgatcgcaccctcttttttcaatccggctgtcacatctacggtatgtaataatgtttcatcaacgactgcaacaaaatccggatcataaatattggaatgaacacgaatcacatctgagctgattcggttgtaagctgtaatcggcgcacccatacgctccgggccgtactccgggaaaccctgtacatgttttccggttttaaaagctacatctgcaagaagcagtgctgctgtcttggcaccctgaccgccacggccatgccatctgatctcaattccgtttttcatgatctatctctctccttcttatgcaactgcgcaagcagcgcagtaaataacatttacttatgaaataaatttcttattttcatcaacttttaacattatatcggtgtactttttgaatgtaaagagatgaaatgactttttttcattttatagatgaaacaaattcatgtataattttaaaaagtgaataaaaatgcaaattgtgtatcaataagtgcaaaaaaggcgaaaattcacgttttaccgtatcttttcgcccttttaattattgttctctgactactttatttcagtcagatattcagcttaaatttctatcttgaatcaatttctgccgttacttctgatttttatattcttcacctgtattttgttcagaaattctattcgtcgacttataatttaatgtttttcagtgcatccagcattgcattgctgccagtctcctgctttgcctctttctgctgtttcttcagataattctgtacatcacgcttggaaactcctgcgccctcttttttccggcgctcctgaaatttactcagacgttccttatatccacacttgcatacaaaagaagcattctcaccgcttccaatcagttccattcgtttatgacactgcggacagcgggcgttcgtagtcttcgcaatcgtctggcggtatccacattcccgatcctggcatacaagcattcgactgtttttgccatttacag

SEQ ID NO: 13319 - DNA, 883 bp, Unknown
  gut microbiota DNA sequence
atggaaagaatttaccacacggtaaaaatataggaacacgagacagtttttccgatatcggagcgacagtgctggattattttggcctgtcagggaatattgcgggagaaagtatgctgtaaaaagccattcggttggctcttgacagatgtttttccctttattacaatagataagattgagtatcaaattagaaataatgcatttaaaaatcttgctatgaaagataagataaagacaagttggagggctaaatttggctgatttacacaaagaaatagaaaaaagaaggacattcgcgatcatttcccatccggatgccggaaagacaacactgacagagaaatttctgttatatggaggtgcaatcaaccttgctggttccgtaaagggaaaggcgaccgcgcgccatgcagtttccgactggatggaaattgagaaacagagaggtatttccgttacatcatctgtactgcagtttgaatatgacggattttgcatcaacattttggatacaccgggacatcaggatttctccgaggatacttaccgtaccttgatggcagcagattctgcggttatggttattgatggatccaaaggtgtagaggcccagacacgtaagctgtttaaagtatgcgtgatgcgccatatcccgatttttacctttattaataagatggacagagattccaacgatccttttgatctgttagatgagatcgagaaagagcttggaattgcaacctgcccgatcaactggccaatcggatccggtaaaaatttcaaaggtgtgtatgaccgcaatacgaaaaaggttatgacattctcagatactttaaaaggaacaaaagagggtgaagaaaaagagtttgatctggat

SEQ ID NO: 13320 - DNA, 807 bp, Unknown
  gut microbiota DNA sequence
atcggtcagaaccaagttctgctttcaagcctttcttattagaataatagctgacagccaaagcaggaaatagagataaatactcctgctcacaaattcggcagcctttattcaatatcgtcctttcatttatcttcatactccatgaatgaccgtgcctgcatttccaccacgctctctttgctgaagttcgtgatacctctgtcggcttcagtttattctgttcataatcccattcgctaagaagctgattatctgttgtcgccaaatcattatatccggcaaggacttctctctccgcacaaacggggcataccgtacctttcacacgggcattgataactgatttccactcgttaccgcatttaccgcatctccaccagacatttttcctcgaatttgcatttacttcatcaggcttcaatggcaagttcttctccgaccactccgaagcaatttcagggtgtgttgtctgcaaatcgttaaaccctttcaggaatatgtacccactgcaatacgggcatttgctcccaccggaacgagtagaaataagggtgttccactctcttctgcaatccttacacttccaccaagccttacgattagcaaagaccgtaacctgagttggaagtaacggataatttctatccgaccactcggcagctatacccggcagaagtgttgcaaagtcattaaatcctgccaacactttattatgagagcagtacggacaacctgttttatttattgtcctgctcttaacggcagcttcccactcgtgtcctttctcacatctccaaatcactt

SEQ ID NO: 13321 - DNA, 166 bp, Unknown
  gut microbiota DNA sequence
tgaagtgttgcaaggtcattaaatcctgccaacactttattatgggaacaatatgggcaatctgttttatttattgtcctgctcttaacggcagcttcccactcgtgtcctttctcacatctccaaatcactttcttatgagaaccaatagaaacctctgtcggtt

SEQ ID NO: 13322 - DNA, 840 bp, Unknown
  gut microbiota DNA sequence
atcaaggaatgctacaataagctcatcatcgtgaacagtaatgatgtcatccagattttcctgaatatatgggaaaattttagttcccggagtttttacagcagtaccatctgcaatggtatttacctgcggtaatgttactacttctccagcttccagagatgcctgcatgcagtttgcacccgccggctctacaccaatgactttgatcttcggatttaacagttttgccagtgtggatacaccggttgcaagtccgccgccaccaatcggcaccagaatatactctactaacggaagttcctggaaaatctccattgcgatagttccctgaccggttgctactgccggatcatcaaacggatggatgaatgtatatccgtgctcttctgccagctcgtatgcttttgcacaagcctcatcgtatacatctccgtacagaacgacctctgcaccatagctcttagtacggtttactttgatcagcggtgttgtggtcggcattacgatggttgcctttgcaccataacgttttgcagcataagccacaccctgtgcatgatttcctgcggatgcagtgatcagaccacgctgacgttcttcctctgacagtgtgctgatcttgtaataagcaccacgtactttgtatgcgccggtaaactgcatgttttccggtttcagatatactttattgccggtctgctcacttaaatactcactgtaaaccagctttgtttcctgtgttacttttttgacgatttcactggcttcctcaaaacgatccagtgtcaacatttcactcatttacgttctccttctgaaacaacgcatctacaaact

SEQ ID NO: 13323 - DNA, 7454 bp, Unknown
  gut microbiota DNA sequence
accaatatattttaccggaatgccaagttcggaatggattgcaacggcaatacctcccttggcagttccgtccatcttggtcaaaacaatacctgtgatctcggcagcttcactgaactgctttgcctgaaccagcgcattctgtccggtggtggcatccaagactactaatgtctcacgatatgcctccggatattccttttccagaatacggttgatcttcttcagctcttccatcaggtttttcttgttgtgcagacgtcctgcggtatcacacagtaacacatctgctttacgggctttcgctgcctgtaccgcatcatatacgacagatcccggatcagatccttcctgtccaccaacgatttctacgccggcacggtttgcccactcagtcagctgttctccggctgcggcacggaaggtatcagcagcacccaaaattacttttttgccctggtttttcagttttccggctaattttccaatggttgttgtctttccaacaccatttacaccgattaccagaacaacggatttttcttcttcaaaacgatatgcagtatcacccacatacatctgctctttgatactgttgatcagcagctcccggcagtctgccggttctttgatgtggttttcttttactttctgcttcagattttcgataatttcctctgtggcacggattccgatatcacccatgacaaggatttcttctaattcctcataaaaatcgtcatcgatatgggaaaatccgctaaaaatagaatcaaatccggacacgatattgtcacgggtcttagtcagtccgctgactaaacgcttaaaaaagccttttttctcttttccttctgccatacgtctcttcctccctcaaatatagttgaaatcaaattttctttgttcgttcttataataattatctgcaaattattttctcacaaaaaaacaatcatactttgcaatacttcaaatccagaaatgctcttgacactcttactttgaattcttatgcatccaattctttttcaatcaggtttacagaaaccagtgcagacacacctttctcctgcatggtgataccatacagacggtctgccgccgtcattgttccacgtcggtgggtaatgacaataaactgtgtattttttgtcagcttatgcagataatttgcaaaacggtcaacgttggaatcatccagcgccgcctcaatctcatccaacagacaaaacggtgacggttttaagttctggatggcaaaaagcagcgcaatggcggtcagcgctttctctccgccggaaagctgcatcatattctgcagtttctttccaggcggctgtgcaatgattcggatgccgcattccagaatatccttggtttcttcctcgccggtcagttccagagaaccttttccgccgccaaacagctccttaaaggttctatcaaacgctgtctgaatatccgcaaatttctctgcaaactgcttacgcattccctcatccagatccgcaatgatcttctccagacttgcttttgcttcctccagatccgcatgctgtgcatgtaagaactcataacgctcggaaacttccttgtactcctcaatggcattgacattgacatttccaagcttgcggatctcgtttcggatctctgtgatctgttttttcagatccgatacattgatctcttccggaacttcctgctcttttgccgcatgataggtgatctcatattcttcccacatgtagttattcagggattcctgtgcattttccgtcttttctttctgctggttcagtcggaacatctctttgtccagattgctcataatctgggagagttcttcccgctgggtaaagaaagttttctgttctgccagcatcgtctctttttccccacggatagcagctaacttttcatccagttctgtcttctgctgaacggtctcttctgactgctcctgcagctgtctgatctgggcttcccgttcttcaatgacagattcactgttggcactgtcatgcaaaatctgcgctttttcctgttccagacggcggatttcctccgcgattcgctggatattctgctgctggaaggatttctgctgctgtttctgtgcaatctcaagtaaaatctcattcagatcctgcgatacactctcgatctcaagatttttattttccacctgctgagccaatgtcttattctgctctgtaatctcattttcctgttttacagacagctgcatctgctctgccatctgctcctgctctgcattccatgcagttttatccgcatcaatttttgcgatttcttcatgaataccggcgtaggcagcttcctgtttttcctgctgctcacggatgtgtccggtctccatttccagagtatttttatgtaaatatgcctgctgcagattgacctgcagttcctcgtaatcgtctttcaaaagcgcatttgccgtcttgacatcttccatacggttgcggatttcctgcgcctgctcccgatattctgcgatctgtttttccagcacttcaatttcacgatttcgtccaagcagattgctgttgttacggaacgcaccaccagtcatggaaccgcccggctgtaaggactcaccctccagtgtgacgatacgcagggaataacggaactttctcgccactgcaaccgcgtgctcaatagtgtccataaccagcacacgcccaagcagataccctgccactttctcatactgcggctgcgtgtgtaccagactgcttgcaattccgatgacaccgttttcgcccaatgctttctctgccggaacatgctccggtgccgacacactcgtcaatggtaaaaatgtggcacgaccataacggtttttcttcaaatattcaattatctgacgggcagtatcctcgttatcggttacgatattctgaatacttccgccaagagctgtctctatcgcagtctcataccgcttgtccaccttgatcagatcagcaatgacaccatgaatgcccggtgtatccgccttgcgctccataatgcggcgaatactgtttccatagccgtcataacgttccgcaatattgcgcagggattccagtctggaactatccttgtggaactcttccttgcactgatccatctttccgcgcaattcctcaaactgctgccgccagttgcttcgtttctgctcaatggaagctttttcttcttccatggaagcgatgttttcttttaattcagccagctctttttcctgcttttgcagcaagccactgacatcatttccgccgcttttctgttccagcagttctttatttaactgcgcccggcggatggaagcctgttcctgcatcgttttcagacgctgctgctctgctttcatagaagcacgggcattcaacagatgtaaaatctctgctttgccatcttcgatctgctgctccatagcggtcgtttcttttcgcagattctccagacgttccgtcaaagttgcctttttctgctccgtctcccggattttttcttccagttctgcctgtttgctgctatattcttcaccggatctgcgctgacgctccacgtctgcttccaatgcttcaatacggctcttcacatgttcttcattctgctgtgccgtatgaatctgctcccgcagtacgttgatctgaccttccagtttttctctggaaacaccagtctcgttcatgcgctgctgcagttcaccgatccgttcatccgcttttgcaacattttcttccagttcttcgtatctggtctttgctttttcaaaattctgtgtcgtttccttctgctgatgctccgtgatgccacatttctgctctaattcccgcagttcggcattcatacgatccatctcaatcaaaaacaggtttcgatcacagtcttttaattcttcttttttcttcagataaattttggcatgttctgcctgacgctccagcggtcctacctgacgttccaactctgataaaatatcgttgacacgcaccagattctgctgttcatcttccagttttttcaacgccgttgcttttctgcgcttgaattttacaattcctgctgcctcgtcaaacaattcccgacgttcttccggttttccactcaggattttatcaatctgtccctgaccgatgatggaatacccctctttaccaataccggtatcataaaaaagctcattcacgtccttcaaacgacactgtgtgccgttaatcaggtactcactctcaccggaacgatatacccgtcgtgccactgtcacttcattataatccagcggaagtttgtgatcggagttgtccaacgtaattgccacataggcaaagctaaccggtttgcggttctccgttcctgcaaaaataacgtcctgcatactggaacttcgcagctgttttactttctgctcaccaagcacccaacgcaccgcatccgcaacattactttttccactgccgtttggccctacgataccggtgattccgttatgaaactcaaatacaattttattggcaaaggatttaaaaccgtgtacctcgattgatttaagatacatacattcctccgtttactctttcgatacgttcaaaatctcacctttgattctgcgtgtatcccttacttgtccttctttctcagcgccagaattgcctgatatgcagcttcctgttctgctgctttctttgtatgaccttccccgcaaccgtagctcttatttccaatgcgggcttccacggtatagttcttgttgtgatccggaccactctcatctaccagcacatactccagctttccgctatgctcatctccctgcacgatttcctgcaggatagtcttgctatcataaaagagctgcatatgctctacattattcagcacaaaacggtgaataaactcttttgcattagcaaaaccaccatccagataaatagctccgataattgcctcaaatgcatccgacaaaatagattttctctttctgccaccggtctgatcctcaccttttccaaggaaaagataatctcccaggttcagtgctctggtacaaaaagccaatgtctgctcacatacaatgcttgcacgcactctggtcagttctccctccggtacatctgaatgctcatgatataaaaagtcactggttacaatttccagtactgcatcacccagaaactccagacgctcgttgtcggataatttcttcatccgatgctcattggcataggagctgtgtgtcaaagcctgacgaagcaagccttcctgctgaaactgataaccgattttctcctgaaactctttgatctgttccatattcttcctcctgtttaatccacaaatggatgctgctgcaaaaatactcactgcaacagcatccattttcctgttatactgattcttacaatgctttcttaatctgctctacagcatcgccaacagttgtaattttttctgcttcttctgtcggaatctcgatctcaaattcttcctcgattgccataataatctggaaaatatccaaggaatctgctccaagatcatccacaaaagtagtctcttctgtaataccgtcagcatcgatgcttaacacttcactgatgatatttttaattttatcaaattccatgacgcaaatcctccctccctgttatttttctacaataatatgctctttgatcttaccattaatgtcctgctgcttgaaggtcacacactgaagaatggaattcttcacatcacttgccttcgcactgccgtgtgtcttgaccaccagaccattcagtccaagcagaggggctccaccgtactgggaagcatcaaaggacttcaacgtctgttttaatgcaggtttaatcaaaagtgctccaattttagaccggagagatgacatcagcccttcttttaccttggaaagtaaggtcgctgcgacaccctcgtacaatttcaatacgatatttcccgcaaatgcctcacagacgatgacatctgcgccaccatgtggaatctcgcgcgcttcaatacttccgataaaattaataccaggacattctttcagtagcggaaatgtctctttcaccagctgattgcctttttcctcttctgctccgatattcaggattgccactctcggattcttaattccgacaatgttttccatataaatagatccaatctgggcgaactgcaccagatgtgacggacgcgcatccacgtttgctccacagtcaatcagaagtgaaactcccttctccgtcggaactaacggtgccaatggtggacgctcaatgcctttaattcttccaaccagcacctgaccacctaccaaagtagcgcctgtacttcctgctgtcacaatggcatctgcttcctgatgcttaatcatattcattccgactaccagagatgactgtttcttcttacgaatcgcatttaccggcggctctgccatctcaatgacttcctcggcatgtacgactttgattttttccttatcatatgtgtatttctcaagttctgcattgacagcatcctgtctgcctaccagaaatactttgatatccttttctgcctgaacagcttgtacagcaccttttacaatttctcccggtgcgttatcgccacccatggcatccactactacgcggactgtttcgctcatactttttcctccgtctccttgtccatccactaaaaaatatacactatgtctatgtataaatcaaccgatttttcttatccagatgtaaaactttttcccgttttttcagtaaatattacactgtaagaaaagttttcaactgagcctcgccatcatgaaaatccttcattccaagatcatataattgctgctctacttcccgatccatggtgtatgtactcattttcggtgggttgctcggtgcaaaaataaatgccttgccttccttctccagatcaaacagctgcttctggcatttgccatacatgatatgacggttatccagcgcttttactgtattcgggaatttacggcacattctgctgtataagaaacgcataccctccggttttttcacaaaacttctcggttttgataaaatcgcaacgatcttgtcacagccgtcatccagggcacgctgtaccggaatcgcatccgtcacaccgccgtcataatacagttttccatcgatttcaatcggtttgcatgctgccggcaatgcacaggaagccataatacaacgataatcatcctgtttcattttactctttggaaaatataccggtgttcctgttgccgcatcggtcgccacgatccagtattccgtcggattcgcacacaatgccggaaaatcaatcggatccacgccggttgaattcgtcatatctccgtaaatatgctgcaatccaaacaaattcccggttttgataaaactctttataccaaaatatcc

SEQ ID NO: 13324 - DNA, 691 bp, Unknown
  gut microbiota DNA sequence
cttgatgtttcatttattgcatttacgacttactcgtaatctccaaccccatacaaagttccatctccccttttgcataaggcagactgatccgcgccagtcgtttgtgtcgatctatttttctgatccgtgactcataaccaaccaatggtccctgtgtcacatatgtttttccctctgcgatatacccggtggacattttcatatgatgagattcatcagacaaacggcgcagtaattcttcttcctgcgtatctacaggcgtgacaataccgccggttgccagtattttggatgccagctcatttcgattcatttctttctcaagttgttcaccattgctgctttctatgaagaaataatccggaaaggaaagagaacgttccagatgccattcaccctgataacgtttcattcggtcgtatgtaaaagtaaagacacaagccgctgcctgttcagataatgtttttttacaaagctccatcagattttgcatgttctgatgcgggcaatacactacataccagataatgatccctccttttttcgtagaatacataaatctacgaaataaagtatatgcccaataactaaaaaatgcaaggaataaaacatatctcagcataatgctcaaaaagtcgacaatctctgtaatgcttattgtaacattttgttttgtttattttcttac

SEQ ID NO: 13325 - DNA, 1001 bp, Unknown
  gut microbiota DNA sequence
tgattactttcgctgatatgattttttaatcttctgggaatgccatgttttctgctgtgatttttgcgtcagcagtagataccactgtctggatatatccatctctagttggtgcttttatgactgtaccgtatcttcggaaaaggttttctttttcaagagcagtagtataatctttgttgaatccaacaggaatcatatagctgtcagaaccttcgtcatatccttccttgagtgcgattggatcaattcgtttcttaccacgaatcatgtcgtggaatgcttggttgtaaattgtacttgtcataagaaattcctcctgtattagtgtgagagtcttggatcacattcagtgcaaatgaatgtgtggttatcaattgcagtcattctgtgctggtcgtggtgcgggcagatgacagtcatgcgatgggcatttggtacttttccttctgtgatacgttccaacacgaattttccgcttttttcttctcgtaagcagaagtcaaagttccctttcttttctaatgaatctttatcaaactgtccgaaggtattgcggtaggcgtttactgtattgctcttgtagatagggaatacaaaattgttcatagtgaaatcctccattaaatcttttttgaatctgtgtttgtaataagtttccagttctgagaaagtgctgaaataatgtccgtttccacggtattccaagcaccagtgtttgtcagatggaatgtggctttgcatgatgaccacggcatctgattggttctgtggaatgatttttctgacctcatattttacaaggtctaatccattccatgtgaatataatttggaatgaaaagaagcaggacaatgggagatgagacccaatgccctgcttctgggttatttggaatgaacggtagtgtatttctggtttttgcttttgggtttgtctggaaacatcatttcaagtttaccagaagataataaaggcttaaacgatgattataaaggata

SEQ ID NO: 13326 - DNA, 20791 bp, Unknown
  gut microbiota DNA sequence
ttggctcccaccactgatactaacttgtttctcaccacctatagaggtgggagtcatctcccatctgatatacttctcaatagcatgtgccacaccacattcttcattcgtgagggtaataacatccgatattgctttaatttccttcgatgcatttcccatagcaacgccaagtcctgctgccatcagcatttctgcatcgtttccactgtcgcccactgccattgtttcttctatagaaatgccaagttcttttgcaatgaaacgaagtcccaaccccttgttgacatttgcggctgtgaactcaatattgtggaaaccaccgtctaccacgcagatatccgggcaggctgtcaacagattccatatctcgtcacggtgtaaaaaggtgccgtctgctgccgggataaaattcagtgtcactttctggattttggcttttccactttttacataggaaagtaaatccggtaattcatgacgtccttccaggaaatgattcacaatgtgctccggaagtcccagtctccacacataatcgtataccgaaaccggggtatagttatgtccgtcgataaacactgtcatataaacttctctctgaaggataaattcaaaaatagaaagtaacttttctgccggaagacaatgctcatccagacagattctgtctgccgtacgataaacagcagctccgtttgttgtgatcagatatggcattgccacttcttttaactggtcgtgtggtacaccgtcatagtctctgccggaagcgaccactacggtcacaccagcttcctgtgccttttgaatggcacggatatttttctccgggatctgtcccgcattgtcaaacagcgttccatctacgtccagtgccagaagtttgattttgttatttaatttcatatacatatgctccgtatggttttaattcgatagcatccgcatactgctgcggtgcatcgtcataattggagatgagcaatgttccctgtgtggctttcacaaaatcgcccaccggataatcgatggtttcttttgtaaagttacagatcaccagtaatgtctcatcctcattttttcgtagtcgtagataagtatataccttttcattgtccgcgtccagaagtttgtatacgccgtctgtgatcaccggcacttcgtgacgcaattgcactaacttcttataaatagaagaaaaccgattccggatctttgactgcagcctctgcattgatggttttgtagttgtcatttacggcaatccacggctctccatccgtaaatccggcatttttttcggtgttccactgcatcggagttctggaattgtctctgggcttctgctttttcaagctggatcttgaagtatccgattgctgccgcaaaaccattgtctcccagacaatgtgcgccctcgcggagcatttatctcagtcggagattgaactcccactgagaaatacttgttactactcaccacttgcagaagtgggagtctcaactcagactgagatcaaaatattctgtaaccaaatcataactttttacctcaacctttctcttgcaggtcatctactaccataaaacgttttctctttcttgaacaaaagttcaagaagtatcacctgcaaacaggcatttttgcaaaattggtatcgttttgaattttgtcaaaaccatacaattcagggtagttaccttttggtactgttacacaagaagaaaacttttttacttattttcacatgccttttggctttctattttttcattcttttctaaacaagttccttttcatcgtttctgctttcactaaatatatttttcaatttttccatgatttttattgacataccaccaatttccgcgctagaataaatagtaactataagcagtgccagttacataaaattcaaagcgaaaatctattttcactcttgtatttgttgtagaatgttgcactgcatttttcatgtcttactattggaggttatatcaactatgaaatatgacgttattatcattggtgccggtcctggcggtattttttctgcttacgaactgatccaccagaataaagatttaaagatcgccgtttttgaggaaggctattcgttagataaacgccactgtccgatcgacggcaagaaagttccatcctgtatcaaatgtccgacttgcgcgatcatgagtggtttcggcggtgccggtgctttttctgatggaaaatacaatatcacaaacgactttggcggtactttatttgaatatatcggcaaagaagaagcactggatctgatgcgctatgtggatgagatcaacgtgacacacggcggtgaaaagacaaaactgtactctaccgctggtacacatttcaaaaaaatctgcatgcagaataaactgaaacttctggatgcatccgttcgtcaccttggaaccgatatcaactacgttgttctggagaacatttataatgaactgaaaactcaggttgatttcttcttccagacaccggttacaaaaattgagtgtttagaaggtgacaattatcgcgtatattatggagatacttctgccgactgcagcaaatgtatcgtttccgttggtcgtatcggaagtaaatggatggaaaacatttgtaaggaactgaacatcccgacaaaatccaaccgtgtggatatcggtgtccgcgtggagcttccggctgtgatcttctctcatctgaccgatgagctgtatgagagcaaaattgtttaccgtacagaaaaattcgaagataacgtgcgtacgttctgtatgaacccacatggaatcgttgtaaatgagaatacaaacggtatcgttactgtaaacggacacagttacgaagatccggctcagcagacagagaacacaaactttgcactcctggttgcaaaacatttctctgagccgttcaaagacagtaacggatatggcgaaagcattgcaagactgtccaacatgcttggcggcggtgtcatcgtacagcgtttcggtgatttagtccgcggacgtcgtagtaccgtaaaacgtatcgaagaaggtctggttcgtcctaccctctccgcgactccgggtgacttaagtctggtacttccaaaacgtatcctggacggcatcatggaaatgatctatgctctggacaaaatcgcaccgggtactgcaaatgatgacaccctgctctacggcgtagaagtaaaattctacaacatggaagtagaactggatgagcatctggaaagctgccacaaaggtctctacatcatcggtgacggcagcggcgtgacacattccctgtcccatgcatctgccagcggtgtctatgtagcaagacatatctgtgaaaatatgtaaatcctatcaaaaataaatacaaacggattttttcagaatattccgattgtacgcaaaaatctcatcccacaggatcaatttcctgcaggatgagattttttattactgctcctttgtattcgaatgtctcaatttatagattgtctctaccaaagactccattttcaacggtttagacagatgttcgttcattcctgcctttttgctcatctcaatatcatcaaaaaaggcatttgctgtcattgcaacaattggaaccgtctgtgcatctgttctgtctaactcacggattctccttgctgcttccagtccatccataacaggcatcatgatatccatcaggatcaggtcaacgcttcccggctcagaagaagcaaaatcatccagcgcttcctttccgttccatgctttacacacctttgctccctgttctgtcagcataaactctgcaatttccatattcaactcattatcttctgccaataaaatccttattccggaaagcagtttcttactcagatccagttttggcatctcatcctgtacttcggtctgatcaatttcaaacggaattttaacggtaaatgtagatcccacatttaccgtactttccacagaaatcgtaccgcccatttcttcgatcagttcctttacgattgccatacctagtccggttccacggtactgtgttctggcatcatttttttcctgtgtaaatggctcaaataactgtgtctccacaaattctttgctcatgcccacactggtatctgatattttaaataaaaaccatgccgcatttccttcgttagacagttcttcggaataaatgttaattcttccacccggtttgttgtattttaccgcattgctgaacagattcaataaaatctgacgaaaatgtatcgggctgccaagcagacgggtatgctccatcggtccacgcacagactggcatacaatgttcatctgctcgatctgcgtctctaccagcgtggataccacatgaagcacatcatccaacacaaacggtacatgctccagttcaatataacctgcctccagtttgctcatatccagcacatcattgatcaaaagcagcagatgttctgcggacacatttattttttccagacattcatccacttttgcctgatcctcacggttatgacggatcatctccagcattcccattacaccgttgatcggtgtgcggatatcgtgactcatccggcttaagaatgccgtctttgcctgatttgcagcttctgcttcctcataagccacccggagatcttccatttccttttgctcctgcgcatgaagttctgtcacatttcgcaacagaacgattccatgcacggcatccacttcactgtcacttaccacatcgtaaatacgattttctgacatcaacaccgtcttttgtatccagtaatagttatcatcgcttcctttttcccgatattcgatcacgacctgattttcaccattttcaaaacgtttcagcagtttatcagatgtatcgatcatgcggtaagctgcccgtgtctcctgactgagccgctcacaatatttctgacagtaggcatcatatgaacacggaagctccataccaaggtctgaaagatcctccagtttgtttgattctcccggtttaaaaaagttctgttccaacacatcttctgtcagattcacagaataaataatgtctgcatttccaagcagcgcatctacataattctcatcttccagcaccgactgtttcatctgctcataatactgctgcagctgaaaccgtgcatctgccatgttattgaccgcattatgcacattctcaaatgccagcaggaaatgatgcagcgctccggtctcatctgcatccacaaacagtacaaaaattcgaccatagactgcctccgatttatcccggaattgaatctgaaattctctggtcggacgctcactggtcagattttttgccagtgcttccacccgaagctgctgcaaaatggtatcctgatccttatattctgccagttccagtgtcagctgttccactgcgccggaataatttccctcggatgccaaaataaaatcctcactttttcggatcatacggtacatatcacgcttcgcatcacagtacatacattccgaaaacttatgccccggaagacgaagtttccgcaatagctgacggtccatctgcttttctgcacgggattcctccagtttcatatgatttttgtgaatatacatattgcggtctgcccggtcaaacagcatccgcatggtgcttccttcccaatccgtagaaagcgcataaccaacggcgtaactgatcggcatttccgcacgtgtcgcggaataaactgccacatgttcttcaattcgttttaactgctcctgcacttccagatgatccatgtcataaaacagcacaataaattcatcgccgccatttctgccgacaaaatattcctttggaacgatctcatacaaaagctgtgcaaaattgcggatataggcatctcctttttcgtgtcccagactgttattgatgacacggagattattcaggtcaaacacacacaatgccactttttccgtcactggctccgctgcgctcaaaagttcttcacatttatttttatttgggattccggtcgcttcatccagatacacttttttctgcaattcccggttcagggcggcatagcgaagcgcccgcaccagttccagtgcagtcagaaaaatcaatgccagaatatcaaccgttaccactttttccagaatatcaagctgtgatgctttcctctgagaatacgcttccgcaagtccggtggcatcatcacagatctggaaaaaagtctcactgtcctcaataatattggtattataatacccactctcccggacatgctgtacttcctctttcagcttctgaaaatattctttttgttcttccacctttgcctgatactttgcatcttttaagcgtaccagtcccagatcttcacttccgttttgcagaccatcaatgtacgattctaccgcttccatcattttatctcttggattgccggtgatctccatcttgatccagcgctgcgtccctccacgcaccagtcccgcataattaaccacacgggcagttccctgaatcccggaaactaaccgcatcatgatcagaataaatataacaagcaacactgtcagtacaccgattgccttccgtgtgatacccgattctttttttgctggcattacaatctatctcccaactctctatccccaaagatgtttcccaaacaccttctcattcttattgtcacgtatcaatctaatttttaatgcttcttttaatttctatttttagatgatagcatacgacctaccgtttttcaaataaaatacagatattttacggtttatttgcaatacaacgtttcctgtgcatttaaaaaagctctgccacgttttcttacatgacagagcctctttttataaatatcaattacattttcctgatgattccttacatcaattttgtttcttctaatttttccgtaaacgcatcgttcaacttgatgatcggttttcgaagaaccagaccgacgatcagggaaatcactaagaagattgcaagttttccaaggtcgatccaataattcattccatacataccgcccaccgtctcacggagtgccgccatactgtgggtaaacggaagcagcggataaaccgcctggaaaaatttcggtgcaacctcaatcgggaaagtaccaccggttcccgcaacctgtacaaccagcaaaataacgctgaccgcttttccgatatcgcccagagatactgtcagggtgtagataatgttgacaaatacgatgctggaaaaccagcaggcaagcaggaacaaaaatggatgctcacactgaatgccaagatataataggtctcccaatgcgatcagtgtactctggaacagacctacgatcaaaaatgtgataaaacgaccgaagtaaacctgatacagttttacattttccagaccttccgtgcatttctccgacacattgactttcaacattgcaaccagcacaataccgccgatccagatggaaagaacggaatagaacggcgccatggaggaaccatagttcgcaatctcatacaccttgtgtgttttgagtgaaaccggggctgccaggaaggaactgatggaactacgatctccggaaataatagattccagttctgaaaaatctccactctgctccatctcatccaatttcgccgtcgtatcggaaatcttgtctgctgcatcgtttagcagttttccggaatctgccagtacactctgaatctgtgtcagatccgaattcgccgcatcggtcagagaataaatgccgtcggtgcttttttccaactgggacaacaagctggaaatcttggtttttgaactgtcaagtgcatccgtcagcttatttaaggaagcctccatggacgactgatactcatttgttgcatctgcgatctgtgttccattcgttgcaaaaagatcctgcaattctttcttcgccgtcgcaatatctgtcgtcgtatcacgcaaagactgtgctgtattttgcagtttatcatgcagttcctgctgcgctttaatcgaagtatccatacgggataccaccgcatctaccgctgaagcaagttccgaatggctgtctgagattgatgccaccgcatcacggacagactgataagaatcaatgatcttctgtacttttgctgccagtgtgtctaatgtggatgcaaccgtttctgtatcctgactctgggtctcaaaggcttttgtgattgtctgattcatctcatcatatacagactgtgtcgcatttaaagccgtttctacgttgtcagtcgccgcatccagtgcactgtcaatatctgaaaagctatccttactcttctgaaaggtttgcttgctctcctgagactgtgtctgtgcactctgcataaactcagtggttgaattcagcagattctgtgccgatactgtcatgtcagaaaaactctgtaacagaccggcagatgcactcaaatctccggagatccgattcagatttgtattcagattacttacgattgtctctgcaccgcttgcctctgtcatattcgaaaccgcctgcaatacagtcagtgtagtatccgaaattgtctcaataaagacctgatttacctgacgctgcaccgcactggctcctttatcggtaaccttcggtgcgatcgcattttcctttgcattggaataataagtaatctctggtttttctacattttcagaaaaaacgctcatcattttattactgaaatccttcgggattacaatcgctgcgtaatattttccggattttacaccggcagttgccttatcttttgtggtaaatacccattccatctgcgtattttcccgcaaagcagacaacacctgatcaccgatattgatttccagtggaatcaggcttccctcatatccctcatccacactggcaactgcgactttcagattgccggtattggaatacggatcccagcttgccgcaatattaaaccacgcatacagacacggaaccacgctgataccaacgataaccacaagggcaatgacatttttgcggatccgcatcatatctctttgaaaaattttccagatgtttttcatttgtcattccccccctttatcatatccatcagttctttctctgtcaggccgctcatttcaagctgccgcacgatcctgtcatgaacatactccacacagatcagatataccaccagtgcgatcaatgataagatccacaaaatcagaaatacaaattttgcctgcagactgaatgataagattaaaaataccagcggaatgatgataattccggcaaatcccatcttgatcatcttcggataacgctgttcgaactgtccggatttttcaatgaatttcttcttggtctcctcattctgcattaatgttttcaacatcagctgtgcctgcggaagctgtttttcgctggtggcagtctcgcctaccatcatttctgtttcttccagtctgcggtcaaacaaatgattcaggttcatcagcaatgggcgaagtaccagaccgataaacagtgccagtgcaacaaacacccacagaaccgtcagatttttcacataagtatggtcataatatcccgcaatacattctctcattgcccgaatcgaataagtaaacggcaggaacggattgagtttctggaaaaatcccggcatcatctcaatcggataggttccggaagatcccggtatctgtaaaatgatgaaaaatacacccagtgcttttccaatatgcttgaaggtcagtgccagtgcataaatgatattgacatacacaaaagagcaaaatacacccgtgcagacaaatacgaccggatggacgcactgtactttcaacaagatcaggtcacccagacacacaataaatccctggatcagtcccagtacgacaaacagcagccatctgccaaaatatgcgctggtggaagaaaaatcggacacttcttcatctttgtctacttcctgcttcaaaatagaaaccaggatcagaccaccaacccacaatgccagattggtgtaaaacggtgtcatgccggaaccataatttttcacatcatacagtacttctgaggtgatggaaaccggtgaggacataaagtccgaaatagcttctgcatcaatgccttccagagacaaaatctgctgatatgcttcagaactctgtaatgcctgcacatcggttgctgtagatgcaagctgcgcgtcgactttttccagtgcttctcccgtcttggtcagagcattcacactgtcatccagactggtctgcagttgctgcagcattgcctttaactgatccaccgttggtgtaattccggataaaattgcagaaaaattaccactgacggaagccaccgcatccaatgaatcatctacgttcggaagggtgtcctgactcagagagtttttataatcacgcagggaatttttgttgttttctgcgatctgttccagactggtacgtgttgtctgagcattttttatgctgtctgcaattgctgaatttccgctgtttaaggaatccaaaagctgtgaaaattcctgattctgctgctgcagttttgtgatttgctctccaatcgttgcagaaatctgagaatctccaccgatgctgtcatgcagtttggaaagttcatccagaatctgtttgtttttctgatttaattcgtttacagaatcaatacttccagacacagaggttgcaatctgttctgcctgtgtctccaattttccaaattttactgccgcattgatataggcatcgtttacaaaactttctccatccgataaactgtttgaaatctgtgtagcaaaggagctggttgacagtcggctctcctttaacagatcggtgctggtattcaatgtgtcagagacagattttacagaatcttttacctgatccagtgtctttaccgtatcgttgatcagactgtcagactgctttacggtgtcctgaaaatctgtcaaaacgccctgataaccggacaggttctcacgcacgtcctgaatcgtctgtaacagttccgaattggtttgatccacatctaccgtcagatttcctgcggaagaactgattacttccgaaattgcctccgatgcaacagaagaaaaagtatcattgatctgctgctgtaaagtcgttgctccggtatctgtgatcttcggtgcaatggcattcttcttttcattaatataatagtctaattccggttttttaatatctccggacaaaatactgagcaatgaatcactgaaatcctccggaataacgatcgctgcataatattctccggattttacgccttctttcgcttcatcttcatcgacaaaggtccatccaagctgcttattttctttcagattctcaatgatcgtctctccggcatccagtgtcatctgtgcgatgctggctccttcatcacagtttgccaccgcaactttaatgcctttcgtatttccataaggatccatattggcatcgatattgaaccatgcgtacagggacggaagtagacacacaccgccaattacaagtaccgctgcacggttccgaagcagacgcttcagatctcttttaaaaattttcagtacatttttcatacttctatgcattctcctgtttttctccattcaataggaagctgttttctttgttatgtttaagctgtaacaaacattatacgaaagcagattttaacagtcaaccatacaatttccgactttcgtctaaaaaacgacgttttttcaaaatcgtaggatttttgcttcgggtaattgtgtggtttaaatataagttatgaaaagggactctgctaacccttactttatgtcgctgtggctatacgataggtttacgaaagcggactcagacaaattttttctgtcagctaacaatcgctcgccagaaaaaatttgctctgagcccgctatttacacatatattggaaaatcagctttattttttcttggaaagcgattattagctgacaagaaaaaataaagctgattttccattcacagtctaccgttctatcacaaaagagttctaaaacacctcattccagccaagttcaagctgcggcgcatctactttttgatcgcgcatcattccggcaatggttctccaataatgatccttaatggctttgcagattgcctcgcaatccccggacacacaagcgtcaaagatgaccttatgtgacgcatactggcgttttgcaacggcttctttatcctgcaccagatcatatccggcaaacagatttccgtaatactgttctttccaggctttctgaacccgtggcattccacacattttgaccagttcttcgtgaaattcattatcacattcaaatacctggtcaaactcctctgcagtcagatttttcattcgatccagaatctcttccaggcgctgcatagtgtcctccgggatttttccctgcagaaaccgcacactgataacctcataattggttctcagcagatatacctcataggaatcctgaaaagaaagttctttcacggaacaacctacgtttcttgtatacacaataatcccttcattttccagttgtcggagtgcctcacggatcggtccccggcttgtatgaaattctttcgccagctccaattccacgatacgctgtccggatttgatctcatggttaaaaattttgctgcggatggcatccacaatgctctctcttaacgtctgatacaataatgcacccataaaatttcctactctttcttacaatctctatctgtatttctctcacagtttctatgaagcttattttacacttgcatttgctaatactttactatgataacacgataatataaagttttttgcacatgatagtaccgaaaaatcatctacatatggtatttttctattattttgcaaactgcagcacaatattttttataattgcagcagctttatccataccttctgccgtgatatgctcataggcaccatgaaatccgtaaccgcctgttccaaggttcgggcacggaagtcccacaaaacttaaacgtgcaccgtctgtgcctccgcggattggggcaatatctggtgtaacgtccgcatctttgcatgcctgaactgcaaaatcaataagctgcatacatggttcaattttctcacgcatattgcgataagaatctttcagattcagctcgacagttccctcaccgtattttttatttaaggaagctgtgatttcctgcatcagtgctttgcgcgcttcatatttttctgcatcaaattcacggatcagatatcccattgtggtttcttccacgcttccgttcagctccatcagatggaaaaatccttcatagccttcggtgtgttccggtgcttcctgctccggcagcatgctctgtaattccattgcgattttcatggaattgaccataatgtcttttgcctcacccggatgtacgttcacaccatggatcgcaaattcagcggaagctgcattaaagttttcaaactggatctcgccttccgcaccaccgtctaccgtataagcatacggtgcgccaaaacgttccagatccatatggcaggctccacttccaacttcctcatcggtagtaaagctgatacatacttttccgtgagggatatcgccttttaataattcttcagcaacagtcagaatttcagcaataccagctttgtcatcggcaccaagtaaagtggttccatctgtagtgatcagagttctgcctgccatctgctgtaatgcagggaaatcagaaacagtcaatgttctaccagaagttccaagaaccacatcttttccatcataattttcaatgatctgcggttttacattttctccgctataatccggtgcggtatccatatgtgcgataaaaccgattgctgtacggttctcatatcccggagttgccggaatatgaccatacacatatccatattcgtccatcatagcatcttcgatgcccatgtttttcatttcttccaccagcagttttgccagatcaaactgacgtgcagtggtcggagaagtggtactttcctcgtcactggttgtccagacttttacataatttaataatctttcatacgctcgcatagtgaatcctcctaaaccaattactcctatgtatttatatataaagtaattttactgtctgttaataaaatctcattgaaaaagacatgctctctttgttcatatccttttcattaaaatcttattacatacatcctgtactgaaatataaagtcattctatatagtaaattatatattttcttttaaaaaaggaatcctgcaagcaggattccttttcatgtcatttactacttagactgtgtacaatatccgaagaagaagtatcccagtggtgtgtagtacatgccttcgattccatcacgcagcatatatttctgtgtatagaagtacagcggatcaactacgtaatcctgacctactaagatgtcctctgcctgatgtaacagtttcatacgtgcagcaggatcagattcagctttcgcctggctgatcaggttatcgtaatctgggttagcgtactgagcgtcgttgtttccaccacctgttacccacatatcaaggaaagataccggatcattgtaatcagaaatccatccgttacgtgcgatagagaaatcaccatctttacgtgtctgaaggaatgcattccactcctgattgttcagtgtaactgttacgccaagttcctgctcccacatgttctgaagtgcttcagcaacagctttgtgagcatcgtttgtgttgtacaggtactctacaaccgggaatccttcaccgttcgggtaaccagcctctgcaaggagctgtctggctttctcgcagtttgcttcataagcatcttttgtcggatcatagtaatctccaccatctttacggaagtcagatccttcctcagcatcagagataccgcttggtacataagcaccagcttcaacctgtccggactgagttactttttcaacaatgtagttacggtcaacagcaagtgtgaatgcctcacgtactttcggattatcgaaaggagctttctgtgtctggaagcatacataatatgttccaaggtaatctacgatcttcatatcgccggaagcgatcagattcggaagttctgcctgcggagcctcctggatgtaatcaagctcgccggatttgaaaccggaaagcatagcgttggaatcatccatcagtttgaatgtgatggtatccggtccaagatttgcataatcatagtagttctcgtttttagccattacgatctgagagttgtgtgtccactctgtcagtttgtatggaccattggagatgtatgtagaaggatcaaatgtccactgatcaccattagcctcgatgatgtcctgacgtacaggcatcatagccgggaatgcacacagctcttcaaaatatggaagatctgttgttaaagttacttcaaatgttttgtcatccactgcttttacagctaactcagaaggatctttctcaccagccataatctcatttgcgtttacaacacaatcaagcatgtagttgtaatctgctgctgtatccgggctaaccagacgtttccaggaatactcaaagtcgcctgctgtaacatcttttccgtcagaccatttgatgccatcacgaaggtggaaggtgtatgttacagttccatcatcatttgttgttttgtcatagctctcagcctggccgtaagtaagttttgcactgtcgcaagttccttcagaaccttcaacttcctcacctgtgctctcccatttcatcagaccttcgaataaatggttagccataacagaaccatctactgcggagttcagggccggatccattgtcatcggctcggatgcgaagtttacagtaatgttaaagccatcaccgtcgttggttgctgtctgctctgcatctgcagatgttttgttgttgtcgttagatgcgctgttgtcgcttccacagcctgcaagcatggaaaaagcaaatgctgcaactaatacaactgataccaatctctttttcatagtactctcctttaaaagttttattgataaacaggtttccctgtgttatccaatctcaaaatctctcacttgtaaaaatgagagccgtctcacaggaggcaaaagcagtttttctactgctccagaaggtggcatgccacccagtgacctttttcatactctttgaatttcggtacacattctttacatttatccattgcatatggacaacgtgtatggaaacggcatccacttggcggattcatcggagaaggaatatctccttccagaacgatacgctgtctgcttctgctcacctccggatccggaacaggtactgcggaaagcagtgtctgcgtatacggatgcaacggatggcggttcagctcatagctctctgccagctctaccatagttcccagatacattacgccgatacggtgtgaaatatgacgtacaacggaaatatcatgcgcgatgaacagataggtcagtcccatttcttcctgcatatcttccagcatatttacaacctgtgactgaatggaaacatccagtgcggaaatcggctcgtcgcaaacgataaattccggttttactgccagtgcgcgggcaatgccgacacgctgctgctgtccaccggagaactcatgcggataacggtttgcatgctctgtattcagccctacccgtccaagcagttctttgatacgatcagtacgatcctttttgttcgggcacaaattatgaatatccagtgcctctccgataatctcaccgactgtcatacgcggatccagacttgcggacggatcctggaaaataatctgcattttccgtctgtatggaagcatgtttacctgttttgcctttggtacttttaccggatgcagattaccctctgcatctctctcccacggatcctctctctcaaaaattgtctctccatcataaacaattgttccggaagtcggctcgtgtaactgaagaatggttcgtcccaaagtagtttttccacatccggactcacctaccagaccaagtgtctctccacggttaatgaagatagaaatatcttctacggcctgtacaccaggtccttttaatccctttaccgggaaatattttttcaggtgatcaacctgaacaagtacatcatttttctcactcatggttgtctacctccgttttttcaatattctctgtctgagtatcaactttttttgcttcttccagacagtcctgcacacgcagccagcatgcagcacgatggttctctcccatttccacatatggcggcatctgctgcagacagatcttcatggcatgctcacaacgcggtgcgaacggacatccttccggcggatttaacatatcgaccggtgaaccttcaatcgggatcagacgctcatagctctcagcatctacacgcggcatagagcgaagcagaccttttgtataaggatgacccggattatagaaaatatcatcaaccggtccctgctctaccattttacctgcgtacataacagaaaccttatcacagatctctgctacaacaccaaggttatgtgtgataaagataatacccatgtgattctgtttctgaagctttttcatcagttccagaatctgcgcctggatggttacatccagagcagttgtcggctcatcggcgatcagaagcttcggatgacagatcagtcccatggcgatcataaccctctgacgcataccaccggaaagctcatgcgggtactgtttcatacgtttttccacgttgttgatacctacttcttccagcatcttcattgcctgcttctcagcgtcctctttgctgacatttttatcatgtgctttcagagcctcaaccagctgatttccgatggtatataccggattcagacaggtcatcgggttctggaagatcattgctacttcttttccacggaaagcgatcatctcatcttttgtttttgacaacatatcctgtccctcgaaagtaatggaaccgcccactactttacccggattctgaagtaatccaatgatagaatatgcttccacgcttttaccggaaccggactcgcctacgacacccataacttcgtcatagtttacatcgtaagaaattccgtttactgctttaacttctcctgccggagtaaagaaagagaccttgagatctctgacctctaacagtttatcatttttcttttcctgttccatattgtctcctcctctccttatttcttcagcttcggatctaatgcatcacgaagtccgtcaccgaacaggttcagagccaagatcataagactcaggattcctgccgggataaataatctgtatggatatgtgctcagaccacttaaagcctcagaacacatagaacctaaacttgtcagcggagcagatacacctacaccgatgaaagaaaggaaggattccaggaagattgcggatggaatctgcaggaatgtggttgtaatgatctgtccgatacagttcggaagcagatgctttccaatgatacgtccgccttttgcaccaagtgcgcgggctgctgtaacgtactcctgctgttttaactgaaggatctgtccacggatgattcggctcatggttacccagtataacaaaccgaatgcgataaacatggagatcaggtttggtccaagaattgttaccagattctgcagcggaccatcaccggaattctggaactgttccagcgccggttttaaagttgcggaaagcagcaggatgatcagcatctccgggatggagtaaatgatctcaacaatacgctgcataacagtgtctacgacaccgccgcaataacctgaaatagatccatataaagcaccaatgatcaaaacgatgatcgcagcacatacaccaacgatgatagaaattcttgttcccaccatgacacggaccatgatatcacgtccctgatcatctgtaccaaatacatgtgggaatactttctcaccatctgcttttttctgaagttcctgtgtagaatatccaaaggctttgtgtttgatgccaagtgcttttgccgcctctgcctctgttacatgttcctcgctctctttctgttgggaaacacttgctttcgcacgaatctttgattcttcaatacgacttaattccttaccttctgcttcagcttcggcttttgctttctcgactgcctcatccggtgtcaggttttcggtattgttatgttcttccatataggcattgattttctcctgatcttccagagtataatgccatggatgtaatgcctcagaaccacgtacctgctgcttataagtataaggaaccacgctcggtcccacaaatccgaaaataaccagggcaatgataatacccagagcaaccattgcaactttgtttctgcgaagacggcgccatgcatctgcccagtaggaaacactcttgcgatctttgataaaatcagctttttcctgagagcttgccggatcaaacgcatcctccggtaatttgctccactctaaaatatcatcaatatttggttgaagagagcctggcttttgaaatcttttctttccagacatgcttaatttcctcccttcgccagattgatacgcggatctaccagtttgtagcacaggtcaacgatcaggttcatgataacaataaaggaagccaggaaaattgtggttcccatgatcagcggataatctcggttctggatagcctgaatgaaataacgtcccagtcccgggatagagaatacctgttcaacaaccataccgccgcacagtgtaaatgcaatctgcggtcccagataagtgataaccggaatcagtgcatttctcagtgcatgtttgaaaataattttaccgtttttcagaccttttgcacgtgctgtcttaatatattcctgattgatggaatccagcatcgctgttctggtctgtcgtgacagataacacatcgggtaaaatcctaatgccagacatggcaggacataactctttggtgttccgtcaaataatgccgggaatactttaaatcccggaatacctccacacaatgtgtgaagtaataatgttgcaactacgaatccaggcatggaaataccgatagtacatacaactctaaggaagctgtctacccatgtacctctcttgtaagctgccagacatccaagcggaagtccaactgcaactgcccataaaagtgcaaacacacctacttttgcagaaaccgggaacatttctttgataatgtctaatactgcacggtttttctgcattttgattgatgtaccgaaatctccgtgaagaagatttccgagatatttgcccaactgaacaatcttgggctggtcaagtccatatttagcatttaaagcgtcgatagtggcctgtgtcggtgttttctcagataaccacggatttcccgggattgcattcatcaagaaaaacgtaacacatgcaactaccagcaccgtgacaatcgccattaagactcttcgtgctgtgtactttgccattttttacacctttcctctctcattctcatacgtcacgctgtcgccaatctagtacaattctgtaatgctttactattgtaaattgtcgacaatattaattattatacctgcttttttcataatggtcaaccaaaatagctaatttttgtatttatt

SEQ ID NO: 13327 - DNA, 1543 bp, Unknown
  gut microbiota DNA sequence
cttttgtctttactttgcagaatatttctaataataaggtaaaaacatgcaaaagtcagcactgaaaaattcggatattttgtataattttaccttcctgaaatagggactggaggaggacatgcacacggacacggacatttttctgcatccgctgcgccgcttatctctgcctcctcccgcgaactcacacgcaaaaccagcgtgctcagacacactcccggaggcaggctatgctcgctcctgcaacgaaaaatgtcctaccgtcctgtgtgcatgtcctcctgccagccaccacatttcattcactccaaaccgtgccacagctggcgctgccctatttttgtactagaattttttcctgtttcgttatagaataacagagcaaacctctttgctataaatgtatgattcatgcagatcaaaaatatactattaaggagtttgattatgaaaaattcaactattacttttattactgatcagctaaagcagctgacttctattccaagtccgacaggctttaccaaagaagtcactcagtatctggtttctacactggaaagcatgggttacacaccggaacgctcccgcaaaggtaacgtccttgtaacgatcggtggcgaaggaagtcctttgattcttgcagcacatgtagatacccttggtgctatggtccgttccatcaaaagcaacggtcgtctgcgcccgacaaccctcggtggacatcagtggagtactgctgacggtgaaaactgtaccgtacacacaagagacggcaaagtatacaccggtgttgtgttgaataaagagccatctgcacatgtagctgaccagaaagtggaaacagtagaagaaaacatggaaatcctgctggatgaaaatgtaagttctgaagatgaagtaaaagcacttggtgttcagaccggagatatcattgccatggatccgcgcacaacggtaactccaagcggttacattaaaagccgttttctggatgataaactttctgctgcgatcctgcttggcatcgcaaaagaagtcgctgatggagcacttactttgaatcgcaaagtttccttattatttactgtgtatgaagaagttggtcacggtggaagttttattccggcagatacagaagaaatgatttctgtcgacatgggttgtgtcggtgatgaccttggctgtacggaacgcatggtttctatctgtgcaaaagattctggcggcccttacaactacgatctggtgacagaactgtctgagcttgcaaaagcaaacggtcttgcttatgccattgatgtatatccacattatggttccgacgtggaagcaactctgcgtggcggttttgatatccgtcatggactgatcggtccgggtgtgtatgcctcccacaactatgagcgctctcatgtggatggtgtaaaaaacacatttgaacttttaaaggcatatttgacaaatgcaagtcgaacgcacgtgagacttggtgcgtgattctggtcagcgaaagctgacatattcttctcagaatcac

SEQ ID NO: 13328 - DNA, 7642 bp, Unknown
  gut microbiota DNA sequence
acatcaacccgcatttttgtattcgtccgtttttcctatatttgtccgcttttccaaaaatcacatattttcgatcatttttacaagcgaacactattcatcatcctgacttactcgctcaatatgcattgccagatatccgatctccagttcttccagaggtttacgaagcgcatggctcagatgatcacagacagtcgttgccagctcatatgactctggaaaattatgctgtacataatcattcatattgactttcagggactccccttttaacacacgggcaaccatatatttcacatgattcatcagacggttatagcttaaagacatcacattgatatgaataccgcgctgttcctcgatcatggatacacaatcgcgcaccgcccgcgccatctgcatggacaccgaaacagattctttttccagtgcagaatgaatgtgtaatgccacataaccaatctcgtcatcatcaatatcaatctgtttctcttctttcagaatcggtcgtatgagagacgccactttaaattccgaatgaaacaatgttttgatatcttccgtcaaaggattggagatctgctctcctttttgcaaacgctgtaccgcaaacgcgatatggtctgccatcggaaacagaatgctgcggtcaatttttccaaaatgacgctctgcctcgtttagaatccggtttgtcatctgaaaatattccggctggatcgtcttgatcagatcagcagcatctccccttgaagaagtctcctgcagggaatatacggtacaatccaccggctgttcaaaacgctcaccgggctttttcccaaatccgacaccttttcctaaaagcacatattctttactgtcattcatatcaagggcaattaccccattatgattcaataccttacatatgcgatacatgtttttacttccttctcccacaaaatagtttgtaatagtattattctagcatagaaccccatattttcaaacccacaaaacagaattcaccctctaaaaaagcaataaaaagcaatcttatgctgtaaaatattgttatgaatcaacgttctatacaagcacgcttcatttttacagtaccatatttacaattatattgacaaaacggacagcaacaaatcctctccgaacctgctgctgcccgcatttctttcgtcaatatttatatttctgcatattcacggatatttttgcgaactttcaaaaccatggacggtgccacagaaagctcatccacacccatttccataaatgcatcggtcagttccagatctgcgccaagctcgccacagatgcctgcccattttccgtatttgtgtgcgttttccacaatcatacgaatcatgcgtaaaatcgctttgtgatgtgcattgtaaaaatcatccagttttgcattctgacggtcgattgccagcgtatactgtgtcagatcattggttccgatactgaagaaatcaaccatctgcgccagttcatcactgatcataactgctgccggtgtctcgatcatcacaccctgttccggcattttataagggatctccgctgcttctaattctgcccgcacttcctctacaacagcaaaaatctgctccacttcttcggtggatgtgatcatcggatacatcacagacagatttccgtatacagcggcacgaagcaatgcgcgaagctgtgttttgaaaatctctggctgcttcagacaaatacggatcgcacggtagcccattgccggattttcttcttcaccaaggttaaaataatctacctgtttgtccgcaccaatgtcaagggtacggatgatcacttttttgcctgccatcagctgtaacgcctgtttgtaagctgcaaactgttcttcctctgtcggaaaatctgtttttccaagatacagaaattcgcttcggaacagaccgacaccttctgcatcattatccagcacactcgcgatatcggaaacacttccgatatttgcatacagatggacgtgttttccaccttttgtaacagtttcctgtcctttcatctgctgcagaagctgctgtttttccgcttcttctgccatgcgtgcttttgtctgctcgcatactttctctgacggctccacaataaacatcccctcaaatccatcgaccactgcctgcataccattcttcattgcatccagatccatcggcacaccgatcagcgccggaatattcatcatccgggcaaggattgcagtatgtgagtttgtagatccgtgtacagttacaaaaccaagaatcttgtctttatccatctgaaccgtctcacttggggacagatcatctgctacaataatggacggctccatgtcgttcatatccaccggtgcatttccggataagttctgcaccaggcggttggaaatgtctctgacatcggcagaacgtgcctgcatataatcatcatccatgcttgcaaacatttctgcaaaattatctccggtaacagcaactgcatattctgcatttaccatctcattgtggatcatattgcagatcgcatcctgataatcttcatcctccagcatcatctgatgtacttcaaaaatcgctgcactggcttctccaacttctttcactgccttgtcatacagtttctgaagctgctcctgagaagcagatactgcttcctgcatacgggcgatctcgctctccgcatctgtgattttttcccgttttacctgtacatcatttttcttaaatactgcgatcggtcctaagacaattcctttatatacggattttcctttgtattcctgcgccatactgctctccttctccttatgatcattcgtttcttactttgttgtttcaatcttctttttatctgacagctcaggtttctttttccaatccctgagctgcatttattttctttacgcttcttcgtatacgtctactgcaaataacggctcgccagcttttacttcgccctctgccagcagtctgactttctggttatcctctaattctgtacacagaatcggagagcataaggacggtgcatttgcggtcagatactcaatgtcgatttccagcatcttgtcaccctttttcacgctctgtccgttttctacaaaacaggtgaaacctttgccttccagatttacagtatcaataccgatgtgaagcagcatggataaaccgctgtctgtcaaaaatccgatggcatgttttgtatcaaatacgaagatgacctgtccgtcttccggtgccacgatggttgctgcagtcggagtaaccacggctccgtcacccatcattcttccagcaaaagcatcatccggtgcagttgccaaatctgctgcgatacctgtgatcgggctggatacgataatggtttcttttacaacttcttttgactcctgtgcctctgctgcattctctgtctgagctgcatctgcggaatcagaagctgtctcatttgtgttaatctcctcattcggagctttttccagataatcttcaaaatttgatttgattacggttactttcggtccgtaaatgatctgaacaccgtttcctttgtgaaccacgccggatgctccggttgctttcaggatcgcatcgtttactaactctggtttgaatacggtacaacgaagtctggttgcacagcagtctacgtcagaaatatttttctttccgccaagtccctgcaggattccttcagaaacaggatcatcccctgctgcaccgttttcgccttcttttcttgcattgacatctgctcttgtatacagttttacttcttctgtatcgtcacgaccaggtgttttcaggtttaatttttcgatcaggaagctgaacaggaagtagtatacaacgaagtagattacaccgatgatcactacccatacccagcttgttttcttgttaccctgtaagataccaaacaggaacagatcaataaatccaccggagaatgtcattccgacaccaacgttacaaatatgcatcagcatgtatgccagacctgcaaatacacagtgaataccatacagcagcggagctacaaacaggaatgtaaactctaacggctctgtgatacctgtcagcatggaagtcagtgctgcggaaagtaacagaccaccgaccgcttttcttttttccggttttgcagtgcggtacattgcaagtgctgctcccggcagaccaaagatcataagcgggaatttaccggacataaatctggttgcagatactgcaaagtgatccacggtcggatcggataactgtgcaaagaaaatgttctgtgcgccttcgatgagttttccaccaacttccagtgttccgcccacgcctgtctgccagaatggcaggtaaaatacgtgatgcagaccaaacggaagcagtaaacgctcaaggaaaccatatacccatgtacctgcgtaaccggatctcagtaccagatcaccaagtgcgtaaataccggactggatcagcggccatacaaagaacatcaggattccgacgccaacaaatacgataccggaaatgatcggtacaaaacgggttccgccaaagaaagataacacctgcggaagctcaattttgtaaaaacggttgtgcaaagcagcaacgccaagtccaacgatgataccgccaaatacacccatctgtaaggatgtgataccacatacatctgtgacagaaccggataacattgtctcagcgccgcctttgatgctgatcagtgctccgatagaggcatgcatgataaaaaatgcgataaccgctgccagtgcagctacttctttttccttctttgccataccaattgctacgcccatggcaaatatgatcggcaggttcgtgaaaataatgttacctgcggcattcataacctgcaaaatctgattcagtacggttcccggtcccataacaccaagcagaccgtaagtttccagcattgtttcatttgtaaaagatccaccgattccaagcagcagaccggctaccggcaaaattgcgatcggcagcatgaaggatcgtccaaccctctgcaaaattccaaaaattttgtctttcatagttctcctcactctttctccataatagacattatttgttatagtgtacccattttttgaattcacatagctggcagttttcttctttcgtctctattttcccgggcaacaaaaaaaggcactaaccctacataaatatcaaaaaatatctatgcacggttaatgcctgcgtaatcagtaacacaccatgtatgattcatttatatcacattgacaaattaatgtcaatctaatacacgtattctttttgcttcttttttcatacaaagcattttctccaagtggtatttctttgtaatcagcttttggctttattattcttcctcgtcatcttccaatcgtcggttcagcacagctgcaatgatttccaatacaattgctaagccaatcacacatcccacagctgcttttccggaaccgcctgtgattgtctgcacaatacctccgatttttggaatggaacgcaccatcttgcccatgtactcattataggtcacgggattcatatcattttcttcgttggcatcacctttcgtgataaattcacccatggcaaaactgtttgaaaccacacgatgcgtgatgatcgaaccctccgcatctgatccgtaaaatgcaatcacatcgccttcaatgatttcctttggttccacatatttgatatatactaagcttcctaccggaatcgctggttccatactgccactgactaccgtatagagctgatagcccatggctttgggaagtgtcaacggaatgcatgctgcgactactattattagcaaaaccgttcctattacgctgcataatgtcgcaattggattttttttctttcgtgtttctctactcaccctttattctcctttgattttatatcatttaaattcctgttttcattgcatttattataactgatttccatcatatttactacttcaaattctacccaaaaactccccagagttttcactctggggagccacattctatgccatcaatcatgattcacatattttttattttgtttctttgctgcggcgtttcagcgctactaaaagtgccacaattgctgctgcagctgccacaatgatcgcaatactgaaattcattgttttcacagattccgactttcctgcatcgatatttccggtaggtgtatcttcatcatccaggtctaccagtccctgcggtgtctgctcgtccgtattctctacagtattatcctgatctgcatcctgtccgccattggcatctgtagttccgcccggtgtcgttgtttcatttgcatttccacctgtcacgttggtaccaccggtcgttgttccatttgcatttccacctgccgcattggtgccactggtcgttgttccacctgctacggtacctgccggaaccgtcactgtattgtaaacagtatttcccggtacaacggttgtaatcgttgtggttgtctctaccacccgattggtctcacccggtgcgtaagtaaaggtaaacacattgtctgcttcattttcactcagggttttggtcagtgccagtgcctgcggaataaaattttcaatataacggtaagcaacgactggtttgtcaccgacatttccataaaaggtctggctttctgccagtgtgttgccatcttcatcctgatactgaaccgtataggctacctgattgcctttgatgccgtatgctacgacataatctgcatcaccgtccacgttaaatgccggtgccgccagagcttctgcattgtcacgaccgctgagacggataccttttacataatatttctcatctgtcacctgaatctggctcagatcaaaagaaacatcatcgcctgcattcagatcctgcacttcgatcttctcctgaccgctgatgctgcccttatttcctgcggataaggttactttgtaagtatatgcatttcccggctgcgttgccagcgcggttgttgccggtgctgccgcgatcacagatacactcaggagagagattaacatttttttccatttgaacatattatttctctcctttctttctgtatgcctttgcttctttcttctttttgttcatggagaagattgcaagaatcaggcagacaattccgcaaaccagagccagtgcacaatatctgaggatcagattggtgtcacctgtttttacccgtttggttgttgttacgacattgtttttgcccggaactttcttctctactttgttttctttggtagtggttgttccttctgtcaccttttccgttgcaaaattcatacggagttttgccagtgtcagctgatagccgttaccctgtgtctcgccatcaacaccaacggtcagatgtactattccgctttcgccggatgcaagtctgccaagatagaagtattcctgtgtggaattatccacctgtttgagaccttccccggctttggaagcgccctcaccaccaacggttgtactgtcgtataatacgttttctgtattgtcggctcccacataagtcagacggtaagtatatccgccgccttctgctgtcgcctgtgcatcttccag

SEQ ID NO: 13329 - DNA, 1719 bp, Unknown
  gut microbiota DNA sequence
tcatataccagtctgtcttgccactgtcagaattggttacctgtactttcagttcgatactgtcacccggctggatgtttgccatctcgtcggtcacatcggaatcctgaaaattactgttcatcttgctgccgtcaaaggttacattccatccgtcagcaccctgataatcttttgcaaatgcagttgtcgctgcccctactgtcataacaagtgtcagcaccaggcacaaaattttctttttcattcttctgtacctccttactgcagactgatctcggtctcatcctctgacacgttcacatccacaccccaggcactcttgatcgcatcttttgcgttatgtgtctgaactgcatcaacttccgcatccacatggaatgtataaccgtcatattggtaactataagtaattgtgttatctttcactgtctttgtcacttcagaagcaatactctgattgatgcgaagtgtatcagacaatgccggtgtggattctccgacacctactgcttttgtgtaatacagaactgtccgctccggtgtggactgatcttctgcgattgcccatccgttatcggtcagataatttaattcgatcaaatccggagaaagtgttgtatttttgtttccatcagcatcctgccagctttttgtaatgatcacacgtacaaatgtgtcgatatttccgctgtttgttacgccgatcgcttcctcatatttcttgcccggtgtgaatttttcattttcaccaagcatcttgcttaataaagtaccttctgtggaaccttcccatttatctggctctgcataatctctgctgctgacaacatctccgttctctgtcagagatacgccgatactctgcatattcatctgtacggaatagttctcactgtaataggtcagtgctgctctcgcacttcccacaccgctcccaaccagaagcactgcggctgccgccagaagcaggactgttactttcggaaatgatttctttttcttcttcatcctcatttacctcctactcctgtgtattgctgctgtctgtcacaacgttgtcccagtcagcgtatgcgtttccatcttcatcataaagaatcggtgtacattcctgaataactactacgttaaactcttccggtttctgatccccggacggaaatttataagtaatattcaattccttctccgtggtctgtcctgcctgaagaacatcattgtaataccagtatccgtcaccgccgtctgtccatccaccgtctggtgcattgtagcttaattccaccggagcaaatgctctgactctgacaaaacaatcataatcgccaacattggaaatcgtgacatgttttccgttttcgtcaacttcctcatgtggttttgtctctgtaaatcccatattcatggtgacaccgccctgtgcagttgcatatgtggtaaaatatgccaccgcacttcccacggtcagggagccggttaacgcgatcgctgcagctgccagaaccaatggttttttatgtagctttctcatttggcttccctcctttactgtgccggtttcgtatggtcatacagaccatttttatttaatttgaagttattaactatgccgtatccgccgtttggacgaccatcggtatcattttcgaaagaaacttctgccgtcgatgcatcgccatcactgtaatcatcatttgctgtaatggttgcctgtac

SEQ ID NO: 13330 - DNA, 5423 bp, Unknown
  gut microbiota DNA sequence
atgtagtagataaaccgtgccagaactttcctgaaaaaaaattgaattttttattgtcaagatgcacatagtaaagtataatcatttatagcgaaagcgattcctggggtgtgcgagaaccctgctattttgaacctacattttcttttatgggaatcttaaatcgccggctggatgccaggccaccgaatatgcagtggaaggcagaagaccggttgcggaatcccccctagcgttgctaggagtcaaaattgcaggaacggcactctgggatcacaaaagagaaagacctacgttacaaaagataaaaatcataaaatacaaaagagaatcaccggatatgatgtgaatgcgtcatatccggttctttttttgcccggaaaaccataaggtgttacatcagatgtgagatgatgtttcacacaaacaggactattttcaaaatgattcgatgaaaaatcattgaaagcatgcggcaaatggatggcagtgggtaaaaagagaggaagcgtggcaatgatgaggcagcaaaaaacggtggtaagttatggacgggcatatgtgatcagacagaagaacaggcgcagacgccgcaaatataaatggttatgtatgggaattggtttgctttttgtgctggtttttctgttaaaaccaaatgtgcaggcagtagaggatgcaggtggatggtcagatcgtgtcagatctttagaattggctggataccttcaggctgccaatctgacaccggaggagacaaggcggctgctgcttccggaattgcaggaatatgtgacaacagaggatgttcagctgatttttgaaaaactgggattcggggagtatacggaagaaattctgggacaggcacagcttgtcgcaggagatgtcttaagccgggcgcagtggaatgtggtgtatgagcgtttactggaaaaacttcaggtaaaggatacggtgtctcaggttatgttacagtatcttggaaaagtattcggagaagcacggattatggcagataatggaaattatgattgtgatctggaaagctgccggatggaatatggaaaaaaatatgtggtatatgtgcagggcaatctgatccttggaatttgttcacaggaagaacagaaacagacggagggaaaagacagtgaaaaggcggaaaacggggcgacagaacaggggacggaagtcacagatcagatcacagttccggatacgatccgggtgttactgacacaggatcagaagcagaatgtctttcgggaagacgtctggatcaaatgtgatgcggaatggaagctttgtgccggagaaacggaagatgtgattccggcaggagaagcacgaagctgtaaagtatggatggaggagcaccagaccgatcaggtgcttgccaaaatctctggggacggcaaattaaaattatgcgattcggatggaaacgaaaaaggaaactatgcaggaaatctgcatgtgtatcgtggagattccggattatggctggtcaatgaattgggaatggaggaatatctgtgcggtgtagttcccggggaaatgccttcttcctttgcaccggaggctttgaaggcgcaggcagtctgtgccagaacttatgctgccatacaggcacttggaaccacgtatgaaacttatcatgcagatgtggatgatacgaccgcatgccaggtgtatctgcctgccaatgaaaatcaggcggcgacagatgcagtaaacgcaacagcaggtgaagttttaagctatgaaggacggctggcatcggtctattatttttcaacttcctgcggttatactaccggtctggaagtgtggcagcaggaaccgttggcttatcttggaaaagtaagtctgctgctttccggagaacagccggtttctgtggatgattttttgaaagactggtccgtgcaggcatatgacagcgaaagcagatttttccggtggaaaggagaacttcaggtgtcggagcgcagggatcagctgatgaaaaaaatcgaagaagctttaagtcgtcaggatgggaaactgacagctttgtcccggaacggacagcatgtggcgtctgtatccgactttggcgattgtaccggaattaagatctgcgacaggtcagattccggtgcggtaacggatctggcagttatttttgatgcgggagaggtgcatgtatacaatgaaaatctcatccgtaacctgatttggcagatctgtgtgtctctgacggataaaaacggggagaatgtcaatactattaccatgctgccaagtgcgttttttacgttgcaggaacaggaaaatggcagatatgagatcatgggcggaggactgggacacgggatcggcatgagtcagtacggtgcagatggcatggcacgggcaggcaaaacggcagccgagatcttgcagtattttttccctggaacagagctttttttgggaaaatagtagagcagaaagaaagggaaaatgcaaagggagcatggcaaatagaagaaaaaacttgctgaaatggataaaatctggtaatctatcgaattgtaaacatatgagaacggtgcattttgtgcatcaaaggggagaaactatggactataagcatttgatacggttctttttggcgaaattgaaaaaagataatattggagcttatgcggcacaggcagcactgtttatcattatgtcagcgattccatttctgttggtgtttctgtcgcttctgcggtttactccggtgagcgagagtacggtactgtccgtgatccagatggtggttccggggcagattaagattacaccgatgctgatcaatatagtagacgaagtgtatacaaattcagcgaaggtgctgccaatcgcggtgatttttgcaatttattcagcggcaaagtctatccagagtcttcgttacggattgaatatcgtttatgataccgatgagacacgaaattggttcgtgctgcgttttcgtgcaatgatcgagacatttgtattgatcttggtcattattttactgatggtatttctggtgtttggtcagaagattcaaaacatgctggtgcagtacgcaccgattttgtctattgtaacagacattattttaaaactgcgtctgctcattttgttttttgtgctgatcatattttttatgtttatttataaagtgctgccaaaccgcaccgctacttatagaagtcagttgatcggggcagttggatgttccgccgcgtggtatgtattttcctttggactgtccatttatgtgaattattttaatggattttcattgtatggcagtctgaccacaattttattattgatgttctggctttacatcagcatgtatatttttctggtgtgtgcggaagtcaacaatctgtttgaaattctgctggtggagattcaggaagcgcgtcgtagaaaaaaagaacggcagcaggataaaaatacttgatgttttaaataagctatgctagaataaatgctagttttggttcggatgtatgattatgtttgaatcgttcctgaattacagatcaggaacaatatattaaaagctgagaagatgtcagtaggcagatgatcggattacagagagagtgtacattggctgagaatacacttaaggaaagacatctggtgaacttcccattggagctgctgttttgaacaacggaatgtcaagtaggaacagacgggtcatgcacgttacgcattagagtgtccgatgcatgtcgggaaaccgggtggtaacgcggaaatttttcgtccctttttacgaaggggcgtttttttatgttctgataactcacactggatttcctgtgaaaagcactttgtgcagaggcgcactcatataaaacgaaattatttatatttaaagaaggagattaaagatgaaagacaagttaaagcagatcagagaaaaagcacttgcttctatcgagaattctgagggattaaatggattgaatgatgtccgtgtcgctttccttggaaaaaaaggtgaacttactgctgtattaaaaggaatgaaagatgtcagcccggaggagcgtccgctggttggtcagatggtaaatgagaccagagctgctatcgagcagaaactggaagagagaaagaaaaaaatggaagctctggaactggagaataaactaaaaaaagaagtcatcgacgtaacacttccggcaaagaaaaaccgcgttggacacggtcatccaaataccattgccctggaagaagtagagcgtatctttgttggtatgggatatgaagtcgtagaaggaccggaagtagagtatgattactacaactttgaggctctgaatattccggcaaaccatccggcaaaagatgagcaggatactttctacatcaatgacaagatcgtacttcgtacccagacttctccggtacaggttcgtgttatggaaaaaggtaaactgccgatccgtatgatcgcaccgggacgtgtattccgtgccgatgaggtagatgcaacccattctccgtccttccatcagatcgaaggtctggtaatcgacaaaggtgttacatttgcagatctgaaaggaacactgcaggagtttgcaaaagaactgttcggaccggagacaaaagtaaaattccgtccgcatcactttccgttcacagagccgagtgcagaggtagacgtaacctgcttcaaatgtggtggaaaaggatgccgtttctgtaaaggcgagggatggatcgagatccttggctgtggaatggttcatccgcacgtacttgaaatgagcggaattgatccgaaagaatattccggattcgctttcggtgtaggtctggagcgtatcgcactgttaaaatatgagatcgacgacatgcgtctgctttatgaaaacgatgatcgtttcttaaaacagttctaaatcgtagattttcgaatctgcacgagcaaagcgaaataacatttttgaataatagattagtaggagaaagaaacatgacaacttcattatcttggataaaagcatatgttccggaattagaagtagagccgcaggaatacatggatgcgatgacactttccggttcaaaagtagaaggatataaaaaattagatgaggatctggaaaaaatcgtcatcggtcaggtattaaaagtagagaaacacccggatgcagacaaactggtgatctgccaggtagatatcggcggagagaccacacagatcgtaaccggtgcaccaaatgtatttgaaggtgcaaaagttccggttgtattagacggcggacgtgttgccggcggacatgatggaaaagtcgtagaaggcggcatcaagatcaaaaaaggtaaattaagaggtgtggaatccaacggtatgatgtgttccatcgaggagcttggatccaata

SEQ ID NO: 13331 - DNA, 597 bp, Unknown
  gut microbiota DNA sequence
gcttataaacggcttatgacaagcctttcccatgatgtaaaaacccctcttgcttctctggttggatatttggaggctgtggaaagcaagatggtaacaggagctgagaaggaagaatacattcgggtggctatggaaaaagcccaccacctgaaagattttgtgaccgccctgtttgaatgggtgaagctggatgccggggaacagatttttcattttgaggtctgcgacctgaatgagctttcccgtgacatcatggctgattgggtgccgctgctggaaaaccacgatcttagctatgaaattgagatacccgaaacagaatacatgacacgggttgactctaccgcctacactcgtattctcaataatttactgcaaaatattctgacgcacagtgatgcaagcaaagttttcctgaccgtgactgaaactgagcagcaggcaaaaatcgttgttgctgataacggcaacgggattgccgcctctgatctcccgcatatctttgaacggatgtatcaatgcgatcactcccgttctgccaaagggaacgggctgggcctttcgattgccaaagagttagtcagtattcataaa

SEQ ID NO: 13332 - DNA, 721 bp, Unknown
  gut microbiota DNA sequence
atacataaggaactgccgcattctgaattgtatctgccagctcacggtcaactttctgacctgcctctgccagaacctcgcctgtgctcggatctacaacatcctctgccagtacatgtccgttgatacggtttttcagcattaatttcttattgaatttatatcttccgaccttagccagatcatatcttctcggatcgaagaacatcgccatgataaggctctctgcgctttctacagacagcggctcacccggacgaatttttttgtataactctaaaagaccttcctgatagtttgtagaaacgtcttttccaaaacttgcaataatctttggttcttcaccaaacagatcaataatttcctggtttgtaccgataccaagtgcacgaatcaatacagtgatcggcactttacgtgtacggtctacacgaacatagaagacatcattggagtctgtctcatattccaaccatgcaccacggttcggaataacagtgcaggaatacagttcttttccgattttatcatgggcaataccataataaatacccggggaacgaacaagctgacttacaattacacgctcagcaccgttaattacaaatgtacctgtctctgtcatcaacggcagatcacccatgaagatctcatgctcattgatctcgtctgcttctttattgtaaagtcttacttttactcttaaaggagctgcatatgt

SEQ ID NO: 13333 - DNA, 8269 bp, Unknown
  gut microbiota DNA sequence
gcgaaatatccgcaaacacttctttgagtccttcttccaaaaaccaattgtaggaattcttctgaacctcaatcaggtttggcatttccagaacctctttttgtctcgaataactcatacgcaaactttttccgtttatgaccggacgtatcctgtttttctccattgacgcttcacctctcgttttctttttctatccctgaaaagggcgcaataagccccatcaaaccacaatagtgcatctatcatagtagcatagtatttttgccaagtcaaggattattttcactttttggcatcatttttgtgagcacaaaaaaacaccaaccggtttcccggttggtgaaaataattcggataaaattatttaagagtaactttagcgccttcagcctcaagtttagctttgatatcctcagcttctgctttatcagcaccctctttaaccatcttcggagcctcgtcaacaactgctttagcttcttttaatcctaaacctgttaactcacgaacaactttgataactttaactttgttcggaccaacctctgttaactcaacgtcgaactctgttttctcctcagctgcgccagcaccgtctccgcctgctgctgcaactacaacgcctgctgctgcagatacgccaaactcttcttcacatgcttttacaaggtcatttaactctaaaacagttaactctttaatcgcttcaataaattctgcggttgttaattttgccattactttttacctccaatttttcgatattttcatcttttaatattctaatttttaagctgctatttgcagcttcatcaccggattactctgccggtgtctcttctgctgccggagcttcctctgctgtttcttcagtagctgctggctcgcagtttgcagcaccaccctgctctgcgatctgattgataacgcgagcgaagtttgtgatcggagactggatgcttccaagtaatttggaaagaagatcctgtctggacggaacgcttgcgattgtctgcattcctgctgcatcataataatcgccttctacaacaccagctttgatttcaagtgccggagctgttttagcaaattttgcaagaattcttgccggagctgttgcatcttcttttgagattgcaattgcgtttggtccctcaagaaccggtgcaagtgcttcaaactcagtacctttgaatgcgaaattcattaatgtgttcttataaactttgtaagaaacaccagcttctcttaattctttacgtaactgtgtatcctcagatacggtaagtccacggtagtctacaactactacagactgtgcaccatcgatctgagctgcgatttcctgaacgataggctgtttcagttctacttttgccacgaatcgtgcacctccttcttaaattttgtttcctcagacgaaaacgggaatccattcacataggaagtactcactttccatgctacataaaaatccctctgtcacgcagacagagggagaaaattcttctttactaaacattaaactgttttgtaaattccctcggcaggttctgcgtttatgcctttcggcacctgctgtcttcggcaattttgtaatctttcgattacacaccgctgtgttttcacacaacgatgcaattatatcattgtatcatttcgatgtcaacaacaattcaaaactttttacacatatttagcagtgtttaatttaacaccaggtcccattgtagaggtcattgttacactcttcaggtactgaccttttaatgcgcttggtcttgctttgatgatggcatccataagggtctggaagttgtccgctaattgctcttctgtaaaggatgcttttccaattggcacatggataatatttgttttgtccagtctgtactcaatcttacctgctttaatatcgttgatagcttttgtaacatccatagttactgttccggctttcgggtttggcattaaacctttcggtccaagtacacgtccaagacgtccaacaacacccatcatatccggtgtagctactactacgtcgaaatcaagccatccttcgttctggatcttcggaattaattcctctccaccaacgaaatcagcgcctgctgcctgagcctcgtctacttttgtaccttttgcgaatacaagtacacgaactgttttacctgttccgtgcggcagtacaacagcaccacggatctgctgctcagcgtgacgtccatcacaacctgtacggatgtgaagctcgatggtctcgtcaaactttgctgtagcgttctcttttacaagtttgattgcatctgcactttcatactgaactgttctgtcgatttttttcgcactatcgacatatctttttcctcttttcatgaattataacctcctgtggttgtatcgggagaggaccctcccacttattttcgttaattagtcctcagctacagtaacacccatacttcttgctgttcctgcgatcatgctcatagcactctctaaggatgctgcatttaagtctggcattttcagctctgcgatctctttgatctgagcttttgtgattgttgctactttagttttgttcggtacgcctgaaccagatttgattccgcaagctttcttgatcagaaccggtgctggcggagtttttgtaacgaagctgaagcttctgtctgcatatactgtaattactacagggatgatcagatcgccctgatcagctgtttttgcgttgaactgttttgtaaactctacgatgtttacgccatgctgtccaagtgcaggaccaactggaggagccggtgtagctttaccagcaggaatctgcagtttgatatatccttctactttctttgccatttgagattgcctcctttgaatttttcgtaatcgttcctttacttacgcttacattttcttcacttctgcgaaacttatttctaccggtgtttcgcgaccgaaaagctctacattgatagtcacgatctgtttgctctcattcatgctctggataacaccaacggtatctttccatacaccaccaatgatcgtaacagtatcgccttctttgaagtcgactaccactttttcttctttgattcccaacggtctcatctcagcttccgtgagtggcaccggctttgatcccggaccaacgaatccggtaacacctctggtatttctgacaacataccaagtgtcatcattcatcaccatattgatgagcacatatccaggaaacatttttttctgaacctgcttttttgcaccgttcttcaactcaacgacatcctgcatcggaattcgaacttcaagaatttcttcctccagatgtctgttttcaattgttttctcaatgtctgcttttaccttattctcatatccggaataagtatgaactacataccagttcgcctcagccataaaaactcacctttgccttcctaaagatttacaaggaaatcaacaccatactggatacccagatccagcaccgcgataatcgcacccaggataacggaaacaattaagactgctacagtctgtttcccaagtgattttttgtccagccaaacgattttctggaactcagccttcagaccggtaaaccagctcgttttcggagcatcttttttcttggtttcttccatcatgtcacatcctttgcatcgccggattatttggtttctttgtgtaatgtatgctttctacagaatttgcaatacttgtttacttccattctttcaggatgagctttcttatccttagtcaggttgtaattacgctgtttgcactctgtgcatgccaatgtaatctttacgcgcacaactttccacctccattaaatttctttgcaactgtatgctttcataaaattatgaatcgcattcaattttaggcataaaaaaaagacctacttccatcgcccatccactatagcacaggaagcaagtcttcgtcaactattttttcgcattttccatatactcgttctgtatcttatgtaaaacataacatatcattcaggacacgtaaataattatttttcattttttaattcagattccattttctttctctccgtttttgataaaacaggaagattcccgtacctgcagctaccataccaattatcagaaaaacacacggcatttttccagaaccaccggttaccggcatagaaaattctgctgcattatcaatatgatatgtcagatcataaaagccatacattttcgtaacttcatcataaaccgctttggataaatctgcatcactcttttcccattcttccagagacttctccagaggaagcgttacttcaatttcttctttgagcagatgatagccttccttcgtttttatttcagtaatttggtaagtctgcggaatcagatctttccactcgatcctgccctctgcatccgttgttcctgtataaacgtctccggtctgtacacctttcatctcaaagataacaccttccagtgggtgcttaaacccttttgaatctttcttatacagacagatacttccctttcgtggactatcatatgcattaacagtaatattttcagtctccagtttttcaaatttttgatcattagaaccatacagctctgcctcagctccattcgcccgctgtttgatcagcattttcaatccatccgtcacagaagcttttttatctgcattttctgaaaagcacataaatcccttcagttgaaaatatcgcggcggcacaacttcttttaacacataacttcccaaaggataaaaaatctgtccatctgcatccgtatataactcatcagatttcaacgtagttccatcctgcatagtataaacatttttcaaaaaacaagaactgtctccgatggtaatttttccatcctcatccgtataaaaataccatctatggtatggtgtgtcctcagttttgccattcacattcatataataggaaagttcaaacacggcgccctgcagagacatatttccacgcacggcaaaaggttctgaaagctcctgatccatttttttcaacgtaagtggaaatgtatgtgttcccggaacttctgtacagacaatctgcgttgtttcttttggtgtcactactgcccgatgaattccatccataacagtttcaccgtcattttcattacacaacaaatatccagcggatgctgttatttcttttatataataagatcctgcatgcagcgtcactatattagtatttccatctgcatctgttctcagtatgtcgatccgattctgatctgccagggcatcttcctgtgacgcataaattccatattctgcgccttccagcgtatagcagacattatcttttacaagttctgcattttcagatattttctgcaatttcaaacttccgggtgccgtattggaaaactgcacttcaactgcatgtgtattcaaattgaaagtctgttcccaatattctggattcagttcatatccgtccggagccttcatttctaccactttccaggtatatgctgtctgagatttcaactgttctactgctatttttacttttccgatcacttcatcttttgcactctggtaagcagttccccagcttccaaaatcaagcactttttttgtactggagaaataatttgtatataaaatatttcctctccagtgataggatgcgcgcccagtttcatctgtctttacggtcgccattttttccccatctttgtagatttcaaattctgcacctgccagaacttcgccagtatctgcatctgttttttctatgtgaatatcaaaagactgagcaacctgatcccgtgcgcgatacgacgcctgcaaatattccgtccttttgaatacgatccgcacgcttccactgaccggatttattacattattccaaagtgctaccttctgcctgcttccttccgcataaatataaacgccaccacctgtcggaagccccttttttctgtaatttaaggtgattgattttccagcaaaagacgcattggtggtaactgttaatcctccttttgccggggcaacctgaacacctgccggaagatttacaaactcgatctgatctgaaatgttattcttatccacaatccatattttttctccggcatcagctgaaatcgtctgccctgtatatgacggaatcgtattataagtactaacttttttccagacttctgcaatcgcctgatcaactttcgcttttgaatccaaatgagcacaagtatacttttttgtattcgtcagcatataccggcttgcctgattataatcttcatgatccttaatttctgaccagatcagattctgtgtcaacacgtaattacatacccagtctgagccaaaataactttttgcataacacactgccttggtcagattgttaatcttgtcaaaactccagccatatcgattctgaagccatttgactccatttccattttcctgcaaataaaagcgtgttccgtttgcagtcagattattcaattcggtagctggctccatacaatatgcccattgttcattcaataataacattgattctgtgccatccgctccatttctgttgtaactggaaaatgcaccacttaaattttgttcgatatttctttttaatatcatggaagaatctgccgcaaacccggtaatttccccaaatagcaatatcgcaaacagtatcagcgcagtaaatacggacagggataatagtttccttctctttttttctgtcatttcgttgtttcctcccactatgctctgctgtttacaaaataataaccataggcaaatccggtatatttaaaatctaccattccagcactgacataccaaaatccattttcgttctgtgcaacaccattataatcaaatcgtaccttcccattttccagataccaccagccattttcattttttgccagaccagtgtatgttgtatctacaataccatttcttactttccaccaggcattatcgatttttgcaacggtatccatactcgaattgaatttaccatttgtcaggtaaataatcccctgatttgccgtaacaccgatagtatcttttaccaatccattcttactgctatccgtctttccttttgtcatccagtatattccatctttgcctgctgccaatccggtataagtttcatctgcttttccattaaccagataccagccattgcttccactcatttctaccgtctgattcaatgggaattcacattttccattcgtaaatttatattttccagatgtcgtatcaaagattccactgttccaatctacccagccgtttacgacatgccaccagccattccaattcggtaccaaaatagattctgtatctttaaccactccctgatctacaaatccccattgatttcctgtttggtcagggaacactccgtttatggtaacatctggcttatccccatcataaacatactgctgttcctcattgatttcctgcgtaacaaccttccacttaacctctgcttctgctgcctttgccaaaactgtacttccatgaaaaagtaacaacagacttcccaacatcataaacagacgcatccattttctaaccacccgctctgttttctgcatctttccgctttccccctttcacattcctatataccgtaaaaatcacgaatcccgccaatactgctactcctgcataacgtatttttgtctcctgccaaattgtctgatccgaatttgtccttatacaattttgtgctgattcattgtcctgcacaaagtccttctttcctgcctctgaaacacccacggtacctgtctctttccgttttgcagaaacaacataacgatatttcccaccacttcggtaaggatgacaggtgatcagcgtcacctgatcggttcccgattgtatctttatccgctctatttcatccggttcaatcacctgaatatccgatactacatattccaaacgttcccatggattcgtcacaatgatacaatccccatgtttcagtgcatcaatatatttaaaatacacctgctgcttccagccacgatgcgctgcgatcacacaattggtattgtttccgccaatcggaacagatgtaccgcccaaaactgctgcgccctgattcaacttttcttcggatgcccccagatacagcggaagcgtacaatcaatgcttgggatttccacatatccaaacattttatctgatacaattccatcaatttcaggt

SEQ ID NO: 13334 - DNA, 3238 bp, Unknown
  gut microbiota DNA sequence
ccacatatgccggttcatataaacagttctgcccactttcaaacaattcctgattataccgttgtatctttccaaatagatccgatttttcctctggttctgactgcatgtgaaactctgcgatttctttctgtattcgtttgtcctgatattgctgatgcagatttggagaaaaaaagatcaaacatcctgccaataaaagtgctgctccacaccaatgcttccatttttgtgccactctgcccgttttttgtcttttcaacatttctttcttccttttttccaaaacattgacaatactttgacaacaactgccaatcccgccatcattgcactgccagccagaattgcattcagatatgcccgcatccataccgaaccattccagtctgccgtttctaccggcacatccactttcttcacatctgcatccgatacccgttctccggtcacgatcagtcgatgtgtgtttactccatagggtgtacaggtaaccaaagatatcaaatcccggttttcatccgggtaaaggtgatctgcctcttccggcaaaagtgtctgtatttcacacacacaatatgtaagactcatatttaacacccggatgtaaaacagatcgccttcacttaattccgtcagatccgaaaacattctggaagtattcattcctgtatgagccagaagaaatgagcggttacccacgcccccaatcggcagcgcggaaccttccatatgcccaaccccctttttcaaaacttcttccgatgttccatgataaaccggaagtgacacattgatcttcggtatttccacaaaacacatcatcccgttttctgttgggttcaacacttcttcataacgaatatcttctggcaaggatgtatcacaatatggttccgtaagcattacccggctgttgaccagctcctgattatatcttcttgcagcttccagctgttttgtaatctctgacgttccactttctgccgcatattgttcgtatacatttgcactggaagccacatgatgttgatacagccaattactgaaccatggataccccatcagtatcactccaagtccgatcagtacaaccattcctgcctgtctgatttttctcatattgcactttatttcattgataagtcttttttacgtgacataaggctgcatcctccggcaactgctgcaacaccaatgatcgtcaccagatacagtcctcttccaccagtctgtggtaacagaaactttttcgtattcgttactgtcaaaatgacggctccattcgaatctgtcatagatgcatccacctgatctacctttgcggatgctttctggattgcacctacatacagatctgtttttccgatcgtgcgaccgtttgctgtctcggatgctggtttcccagcagccgttcctgtcagctcatctagctgatctgttacaagatttccattttcatcataaataccgccattgtagttttttacaatctgttccacagcttcctgattcattcctgtcacgccacaaacagatgcgatcacgtctctgtccgtcgcggtaatatcaatctctaccggctcacgcagcagattatatccccgatccgtcgctgtctctgtcaaaagatactgatctgcttccagcccttcgatctgcaatcttccgctgtcattctgtggcacaaaggcggttgcctccacttccttagcggtctttccagttacataatattttccgtccttctctgatttttcagcaatcacgtaatagtcatctgccttattttgaagtgtaaactctacctttttaaagtttcccttatcatcagaaaatgtctttgtcagatctactccataggtatacacataatttcggtcttccaacatgttgtaataaccatccgaagtacgactccaaatcaaactgacattgttctgatttccttcatcgccgataatcacagatgcatctgatctgacagttgccgtataagaaactaccatataataatctgataatccctcctcacggtttttaccaccatttaaaacattcagtcccagttccgtcagccggatattcattcttgtagagccatccggtgtctgcattcctgtgtccggatcctgtaccgtcacataggcatattcctgagaataatcaccggaatccagctcccacacagaaatggcattctctgtattattactgttcgcatcttttccattatcataaaatgcgatttttgcatcacggttataacgtaaacctgctgctaatgtgtccgtgaaagtatattcactcagataggtagcagctgaagtaatatgcggtaatttggaaaccagaatataatccagcacatctccctctgatgccgtcaccgtatccgcataagagaaatcgttccccgctgtaagaaaatcagcagtagaaaccttttccccgttccgtggcagcacactgtcagcataccttctcacacttttatccagcgtcgggtttcctgtctgattcttcggataacataccatgtcatacagccaggtatttcctgcttccaagttggtaaacggaagctgaacaaaccatggatctaccgtatccacaacctgttccggaacttctgcctccacaaacagatacagtccaagtggcagattttctgcatgtgtttccccatggctgtctgtctttggcaaattgatcaccccagccacactgctttgatccgttgtatcactcaatgttccataatcatacagataatgttccagctcatttttcgcagaaacattatcttcttccaatatctgttccatagcatcagaaatctgctggcttgtataatgatacacgtcctgattttgacacggatacgcttcatccgatgttgtcatatcaatcgcatcttctgccttcaaccccaggatttctgccagcctgcccggaatctcatagactaattccaccagtgacgttgcatcactatgcaccatgtgcgtttccacatttccgacccgcagacaggaaaactgtacgccttccatgccgtaatctgacagagcctgttctgcctttgtattttgttcaccatctgcttcatcctgtccctgcttgtaatcaccagctgcttctgccgatgttatatcgtattttcgaatcgtgatacttcccttttttgaaagatctaccgttgacgcttccacagattttccacgtttctctgact

SEQ ID NO: 13335 - DNA, 1522 bp, Unknown
  gut microbiota DNA sequence
aagcaggtgctccgctttcacctggagcaaacccatcttacggtgcagagcagaacggattattagcatccctgaactctgttgcaaaacttccatatgaagaagcactggatggtatctccaatacacagaccatcaacccgggtgctctgggacatgatgaggctgagcgtgtagataatctggtaaatgttctggacggatacttcgatcagggtgcacatcacctgaacgtaaacgtattcggcgtagagaaactgatcgatgctatggagcatccggagaaagaagagtacgcaaacttcaccatccgtgtatcaggatacgctgttaaattcatcgatctgacaagagagcagcagatggatgtaatctcacgtacttgccacgatcatatgtaaaacaccagtggacaaaagtatgtttcctgcgttatgcttgcataaaagcaggaaacatactttggaacacgcccaaccatgaggataaaagcaggatgaaatcctgcgatatccgaatggtgggaagaattgcgggaatgcgaagcatggagtaattcgtatggtgttttttataacaggaggaaaatatggaaaaaatcacaggctacgttcactccctggaaagcttcggctccgtggacggaccgggagtgcgttatgtgattttcctttccggctgtgccatgcgctgccagttctgtcataacccggacacctgggaaatgaagagcgggcagccgtacacagcagatcagcttttggaaaaagcctgtcgataccgcacttactggaaacagaagggcggtattactgtcagtggcggagaaccgctgcttcagattgattttgtgacagaactgttccgcaaggcccaggaaaagggaattcacaccacattagataccagtgcaaatccgtttaccacaaaagaacctttctattccaaatggaaagaactgatgcagtatactgatctgatcctgctggatatcaagcatattgatccggaaggtcatctggaactgaccggtcagccaaacgacaatatccttgccatggcgcgggagttgtccgatatgggaaaaccggtgtggatccgtcatgtccttgtgccggaacgaaacgacaaagatgagtatttgtatcgtctggcagattttatccatacactgaaaaacgtggagcgggtggaagtgcttccgtatcataccttaggtgtatttaaatgggaaaatctggggattccgtatccgttggaaggtattaaaccgccgaccaaagaacgcgtggaaaatgcagagcgggttcttggagcaggtgcatttgcaaagaaataaatatggatgattggtatttcttcttccttatatagcggaagaagcattgtaaagaaaaagcgtgcgtaatgcatgctttttttgataaaaaatttaatttttttgaacctttttaacaaattatagcaagaattctccttcctctacaggtgggagatgaattgcaaaaataaatataaaaag

SEQ ID NO: 13336 - DNA, 755 bp, Unknown
  gut microbiota DNA sequence
cctcgaaaaagatgctgcggaatacaccggcgatgtataaaaaagaatatccgtttttgaaagaagtggatgctctggcacttgcaaatgtgcagctgcatttggaaaaagcatataaaaattttttcagggatccgaaaagtggtttcccaaaattcaagtcaaaacacagaagcagaaaaagttatacgacgaaccgggtaaatggaaatattcaggtagaagattaccggataaaactgccgaaacttacgtggatccgtatgaaaaagcaccgggatataccggaaaaatatcgtttaaaatccgtaacggtcagcatggaaccttccggaaagtattatgcaagtcttttatatgaaatatctgactgtgagaatcaaacaggaggagtggattatgaagatgcaaaaatactggggatcgactatgcgatgcgtggaatggctgtgttttcagaaaatataaaaaaagaagatgctggttatttcagaaaaagcgaggagcggcttgcaagggaacagcggaagttatcccattgtgagaaaggaagccggaattatttccggcagaaaaaacgggttgcattatgccatgaaaagattcggaatcagaggcgggattttctgcataaactgagccgcagaatcgcagacgaatatgatgtcgttgcagtagaagacatagacatgaaagcaatgagccagtgcatgcattttggaaaaagtgtcatggataatgggtatggaatgttc

SEQ ID NO: 13337 - DNA, 7871 bp, Unknown
  gut microbiota DNA sequence
aagaatgccggagcattcttgaacccatatctgctgtatagatggaaaggaaaaaagatggaagttagccagttaatcgaattaatgaacgctgtttccgaggcaggtctgacagatttctgttatgaagaaaatggcgtttccgtaaaaataaaaaaacatcctgagaaaaagattgtagcgtctgcaccggtagaaatgatcgcaccgtcagccgttgcagcaccggcacagattccggcagcagcaccgacagcaaaagattcagatgcagcagaagaaatcggcggaaataccgtaaaaagtcctctggttggaaccttttattctgcaagtgctccggatgcagcaccgtatgtacaggtgggcgataccgtgaaaaaaggtcaggtacttggaatcgtggaagcaatgaagctgatgaacgagattgagtccgagtatgacggaaccgtaaaagcaattttggtaaaaaatggcgatctggtagaatttgatcagccaatgtttgtcattgagtaggaggtctgggatgtcagttttaacaacaaaagaaatcatggaaatcattccgcatcgtcagccgtttctgctgatcgatacgattgaagaattagagccgggcaaacgcgcggtaggaaaaaaatgtgtcagctacaatgagccgtattttgcaggacatttcccggcagaaccggtgatgccaggtgtgctgatcgtggaagcactggcacaggttggtgccgtagcaatccttggatgtgatgaattcaaaggaaaaaccgcttattttggagccatcaattctgcaaagttcaaacgtaaagttgttccgggagacgttctgatgctggaaacaaccatgatcaagcagaaaggaccgatcggtgtggcttccgcaaaagcaaccgtagacggaaaagtagcggttatcgcagagttgacctttgccattggttaggagagagaacatgtttcagaaaatattaattgcaaacagaggtgagatcgcagtgcgtatcatccgcgcctgtagagaacttggtatcacttctgtggcagtctattcaactgcagataaagacgcgctgcatacccagctggcagacgaagccatctgtatcggaaaagcagcaccggcagacagttatctgaatatggaacggattttgagcgcagccattgcatccaaagcagaagccatccatccgggatttggatttttgtctgaaaatgcaaaatttgcacagatgtgtgagcagtgtcacattgctttcatcggaccttccgcggaagtcatccgtcggatgggaaataagcaggaagcaagaaacaccatgatcaacgcaaaagttccggttgttccgggcacaaaagaagcagtttataccgctgattatggtctgaaactggcagaacagatcggttttccggttatgatcaaggcagccagcggcggcggcggaaaaggtatgcgtatttcccgcagtgccgaggattttacagaaaattttgaagtggcacagacagaatccgtcaatggttttgctgatgacaccatgtacattgaaaaatatatcgaggatccgcgccatattgagttccagattctggcagacaaattcgggaatgtcatttctctgggtgagcgtgattgttccattcagcgtcgtcatcagaagatggtggaggaatctccatccgcagcactggacgacaaactccgtgcccagatgggtgaggtagctgttcgagcagcaaaggcagcaaattatgagagcgccggaaccatcgaatttttattagataaaaacaaaaaattctatttcatggaaatgaatacacgaattcaggtagagcatccggtaacagagcttgtcacaggtctggatctgatcaaagagcagatttttattgcagcaggagagaagcttcagtggagacagaaagatatctacatcaccggtcatgccattgagtgtcgtatcaatgcagagaatccggcaaagaattttatgccttgtccgggaaaaatcgagtatctgcatttgccgggaggaaacggtgtccgcattgattccgccatttacaccggttacacgattccgccaaactacgattctatgatcgcaaaaatcattgtatacggaaaagacagacagacagctatcgataaaatgcgcagtgcactgggtgaagtcaacattgacggaattaccacaaacctggattatcagtacgatattattacacatccggtgttccagtccggaaatattacaaccggttttatcgagcagtattttgagaataaaggtgaagcatagtgttaaagtttaagaaaacaaactatattacagttccgcgaaaagagcaggatatcccggagggcatgtggatcaaatgtgacgcatgcggggaattactttacaaagaagatgtggtacacaatcactattcctgttataagtgcggcaaatatttccgtctttccacaaagcgcagactgcgcatggttgcagacaagcagtcctttgaagagtgggataccggtcttcagacagcaaatcccctggagtatccgggttatccggaaaaattggacggattaaaggaaaaacttcatattgatgaagctgtgacaactggggtatgcaccatcaaaggcgagaaaacagtgatcgcagtttgtgatgcccgttttctcatgggaagtatgggatatgtggtaggtgaaaaaatcacccgcgcggtggaaaaagcgacagaaatgaaacttccggttatcattttctgctgttccggcggtgcccgtatgcaggaaggaatggtctccctgatgcagatggcaaaaacatccgcagcgctaaagaaacattccgatgcaggactgttatatatttctgtgcttaccgatccgaccaccggtggtgtgacagcaagttttgccatgttaggtgatattattctggcagagccgggtgcgctggtaggatttgccggtccccgtgtcattgagcagaccatcggacagaaactgccggaaggctttcaacgcgcagaatttctggtagagcatggtctgattgacggaattatccgccgtgaggacatgaaagataccttagcacgtctgctgcatatgcatacacagaaggcatctgtggatatggtggatgcagtagagcctgcgtatatcatgcatgcgcagaaaaagaaaaaaggaaaaatgaccgcatgggatcgtgtgatggcagcgagagcttccgagcgacttactgcgttagattatattcatgagattttcagtgattttgaggaatttcatggagaccgtcatgtggatgatgacggagcaactgtaggcggtattgcttatctggatggatgtccggttactgtcatcgggcagcagaaaggacgtactaccaaagaaaatattacaagaaactttggtatgccgtctccggaaggataccgcaaggctttacgtctgatgaaacaggcggaaaaattccaccgtccgattatcaattttatcgatacaccgggtgcatttccgggactggaagccgaggaacatggacagggtgaggcgattgccagaaacctgtatgagatggcggcattgaaagtgccggtactcagtatcgtcatcggtgaaggtggcagcggcggtgcgttggcactggctgttggaaacaaagtctggatgatggaaaatgcgacttatacgattctttcaccggaaggatttgcgtctattctctggaaagatggaaaacgtgcaccggaagcagcagatctgatgaaagtaacggcaaaagatctattggaaatgggaatcgtagatgatgttattgacgagccaatgccggcgagtgaagcgaatttggtggaactcagtaaagatatgaaaaatcggattcgtggttttctggcggaaaatcttggaaaagaaccggaaaaacttgccgaagagcggtacgaacggttccgaaaattctaagatgacttaaaaatttactacgttaggttataataggacctcctgcaattttatctcagtcgctaccaatcgctccttgagagaaaattgcaggaggtcttaatttacgaagtgaagttagtaaatttttgcgccatcttgcactacgtgccgcccaaaacgaaacttaaacgcgtcgaagtagttcccaccaacccatagctacgacaggcggcatgattttacagaacaatcgatgcacaaaacagaccggtcccggagtggatacccaaagtccgagtttattatccagcaaagcaagacgtaccacagattttgtcctggaagccagtggaaaatggtgtacggcacgggctgcttttggattgtcggtatcttttgcaacaccgataaattcggtatctttgatccagtatgggcagacggctgtcacataaatctgttttcctatcaattcccagcgaagcgcctgactgtagcggagtagaaaggctttcgatgcagcgtatacattgagtccctgcattggttgaaaaccggcagtggaacaaatttgtaaaattctggaacccttgtcaaaatgtggcatacaaattgctgtcatatgaacggctgctttacaattcagatcaatcatatgggttaattcttccggctgcaacgtaaatggtccgccaattttggcaagaccggcagcattgaccagatatttgacagtaggagcttcgatgtccagtttatcctgaaaatctttcatctgttcgtcatctgtaatgtccatcggcatagcggcaccgacacagatccctgtggcagaaatttcctgtgccagagcgagcagagattcttttcgtctggcaagaagccagatttcatcaatttcagaagcatagttttgacaaatctgcaaagcaaattcacgtccaagaccactggaagcgccagtgataattgcaatattcatatatataaaatcctccggattatttcgaaaaataagttgccgtgctatcaataaaatttccataataaaaatggtgatagaacttctattatcttataacaaatacgagtcctacgcaagtcatcgtagaataaacagcatatggggtacataaataattgagttatgtgcaaatagcatgaggaaattgtaaaaacgcttctgaatctgatagtgtaataaaaaatcaggttacatatagataaatctatgataagataatttggtggaaattacagaaagttaagaggacgtgtttatgaataaaaaatataaatgcatcaacagttttgcactgaaaatgattgccattataacaatggtcattgaccatgtgggcgcggtgctgtttccaatgaacatgatatttcgttatattggaaggatttcatttccattgtttgtgtttttacttgttgagggaagtattcataccagcaagattcgaaaatatgaattgcggatgtttttgtttgcactgatttcggaaatcccattcgatctggctttttcaaatgaaatcgtagatatccattcccaaaatgtattttggacgctgacgattggtttggtgatgctggatctgattcagaatggagcatcttatgtgaaaggacataaaggcaagatgctacaggaagtttggatcgaagggcaaccgattccgatggtgtggcagtttgttgtagtagcagtttgtgcctgcgtggcacaggcattgcagacagattacggtgctggtggcatcttattgatttattttatctggatgctgcatgagaatgtgatcgctcaggcagtggcatttatcatcatttcgctgctgtttttcggaagtgtggaactgccgggtgtgattgcctttttgccaatctttttgtataatgggaagaaaggtccatcggcaaaatacgtgttttacgcgttttatccggtgcatttgtttattttgcatctgatacagatgagtactgcatttgtgtttatcacattttaagtatgatatttgtatggctatggaagaaggatgtatgtgaaattctacatgtgattttagttcgcgtaagtgaaaatccttcgatttggaaattaaaacgggaggcatatttttttgaaattctggaaacatttaaagacaatcaatcatcataaaatgctggtcatgaaaggctgttttcgggtaggtctgtacaagcagggcctgttgcatgatctgtcaaaatatatgccgtcggagtttttggttggctgcaaatattatcagggagatgtcagtccgaataatgcagagcgaaaggacaagggatattcttccgcatggcttcatcacaaagggcgaaataagcaccacatggaatactggattgattatggtgtgccgccggagccggcgatgataggaatgcgtatgccggacaagtatgtggtggaaatgtttattgaccggatgtctgcttcgaaaaattatcagaaggaaaaatatacggattgcagtgcgttggagtattatctgtatggaaaagatcgtcatattatgcatccagaagtacgggaattgttggaaaaattgttgtatatgctggcagatgagggcgaggatgcgacttttgattatattcgcagagaagtattgcataataaaaagtaagaccagaagtttgattaaatataagggatatttctcagctgaaaagcaagaaagtgtgaatgaaaaagcaaaaaataaggtgttatataaacgttgccggaaggtatgggtaagttctatctcaatcgaagttttatgactgagatagaagctgctgcatatcttccggcagttttgcgtttatggttaatttttcacccatgattgggtgtgtaaaggtcagggatgcacagtgcagtgcctgacggtacatggaatgatcttccggatgatacagaaaatctccaagaagcggatgcccgatgtgtttcatgtgtacccgaatctgatgggtgcgcccggtttccggtctgacacgaaccagagaaatctgtccgttggtccattcccggataaagtgagtcacggcagaatcaccattttcaaaatccacgcaccgctcaatgacagaatctgcggcacggcagattggtgcatcaatcgttccttcttctggagtaacaccgtcgcaaagtgccagatactctttctgaatctgtttttgctgcattgcttttgaaaggacagaagcggaaagcatgtgtttagccagaagtgtgacaccggtggtgtcccgatccagtcgtgtgatacagcgaaatgtgtagggaatctgctgtgcggtataataccacagcacgccattcgccagtgtttgctcataatgattgatggaaggatgaatcggcatatttgccggtttgtcaatgaccagaatatcctcatcttcatataaaatggagagaggaatttcgtttggcacgatattgtcggaaccttcgttttcttctatgtggatgtgaagggtgtcaccgatgtgaagtggttcgtttacgtaactccagatgccgttttttaaaatactttccggtgtttttttcaaatgtacgattaagttagaagagtagccgtgttcctttaaaaattgaaggatgctgtcggattcttttgtaatctgataatttaaatttcgaatcatactataaataattgaaaaattgcatatcgatatcacataaaaacatgaaaaatatgcatagtctatgagtgcctgtttttgttaaagtaaattatatgtactatagaatataatgagtacaaacgagtcaacatgtttgtgtaattgattcgtgacaaatgctgactatgaactagatatcagatatgattat

SEQ ID NO: 13338 - DNA, 834 bp, Unknown
  gut microbiota DNA sequence
aattccgaatttccgtggaatgctgtttagaagatgatatcgacaatagagccgaatgatgattcagactacatagtaaaataaaaatcagataaatcacagaacggagaaaatacatgtattttgaatatggagaaacagaaatagaatatctgaaacaaaaggacaaaaagctggcagaagtgatagatacacttggaatgatcgagagaaccgtggacacggatcttttttcttctgtggtacaccacattatcggtcagcagatttccatgaaagctcaggcaacgatctggcagcggatgcaggacgatcttggtgtcatgaatgcggaaacgattctggaagcaggaatcccgaaattgcaggcgtatggaatgacgtttcgaaaagcggaatatctgacggattttgcagaaaaaataaaaagtggggaatttgatctggatgcagtatggcagatgtcagatcaggaggcgattgaggcgttatcgtcattaaaaggaatcggtgtgtggacggcggagatgattctgctattttgcatgcagagactgaatgtgtttagctatggtgatctggcgattttgcggggacttcgtatggtgtatcatcacagaaaaattgataagaagttgtttgagaagtatcgcagacgtttttcaccgtattgcagcgtagcgagcttgtatctgtgggcggtgtcaggtggtgcgattccgggtatgaaggattatgcgccaaaaacggtaaaaagtaagacggcagataagaagaaagcgaaataaaaatgtcattcggaattacattaaattcaagtcgaacgcacgtgag

SEQ ID NO: 13339 - DNA, 620 bp, Unknown
  gut microbiota DNA sequence
acaggtctttaatttacggatacttctccggccaatacttttttgtagtcctcatagtttttcttcagaagttccggcgtgttcagttcatatggacattttttcatgcactggccacattccagacagttttcaatttttttcatttcctcctgcatttgcggagtcagccagccggcactcggtgcgcggcgcagcatgagggacatgcgggcacactgattgatcataatgccagccggacacggcatacagtaaccgcagccacggcagaaatcaccggtcagttccagtttttctttttcgatataagcacaaatttcttcatccatggaaggggtatgttccatataagagagccattcttccagttcggatattttctggattccccagattggcagaacgttatcaaattgtgtcatataagccatggcagctttggagttgtggatcagccctccagcaagtcctttcatggcaataaatcccatgttttgtctggaacaggcttctaccagctgaagttcctgtacagaggaaagatagctgaacgggaactgcatggtttcgtacagaccggaagcgacacattcttctgcgataccgatcttgtgcgc

SEQ ID NO: 13340 - DNA, 2109 bp, Unknown
  gut microbiota DNA sequence
cttgcagaagtgggagtctcaactcagactgagatgaatgaaaacgttttgaaatatcagtttgtcagcttaatctgatcggattacaaattgtattattgaaaaaaatgttgatacagttattgcagatactgataggtgaaaaacgttttttagtatgattgaaaaacatcaattcaatattttttgtattgcgttatccttattttatacgccaggttaataaatgtccagaaaatgcataataaaattcttttgattttttcagaaatgatttatgatagaagtactgaaagataagagaagttcagacaggaaattttagtcagaaaacgtgatattacaagatgatataattgaaaaagaaaagggggcaatacaatggagaatgtgaaaattgcagaactgatccgcaacggtgagacagtacttggaatggaatttggctctaccagaatcaaagcggttctgatcgatgcggcaggaaatccgctggcttcaggaagtcatggatgggagaaccgtctggaaaatcagatctggacttacagcctgactgatatcaaggaaggcttgcaggattgttatgcaaaactgaaacaggatgtacaggaaaaatacggtgaaacgttaaaacgggtagctgccatgggatttagcggaatgatgcatggttatatggcatttgacgcgcaggatcagcttctggtgccgtttcgtacctggagaaatacgatgacagagcaggcggcaaaagaactttccgagacattttcctttaatataccgcagcgttggagcgtggcacatctgtatcaggcaattttaaatggggagtctcatgtaagccagattagctttgtgacgacgctggcaggctatattcactggcaacttaccggcgagaaagtggttggtgtcggtgaagcggcaggtatgtttccgattgattccaatacaaacgattacgatgcggcaatggcagcaaaatttgacacattattactggaaaaaggtctgaattatcatctgaccgatattttcccgaaagtactggcagccggagaaaaagcaggtgttctttctgaaacaggtgcaaaactgttagatccggcaggagatctggaagcaggcattttactttgcccgccggagggcgatgccggaaccggtatgacagcgacaaacagtgtggcagtccgtaccggaaacgtatccgcaggaaccagcgtgtttgccatgattgtactggagcaggcactttctaaatattatgaagaaatcgatatggtaaccactccggatggtaaaccggtggcaatggtacattgcaacaactgtacttcagatctgaatgcatgggtaggcttgttcggagaagcactggaggcttttggtgtgaagccggacatggatacattgtatggcacgttgtaccgcaaggcgctggagggcgatgcagactgtggcggtctgctggcttataattatttttccggcgagagtattaccggttttgaagaaggcagaccactgtttgtgcgcagaccggacagcaaatttaatcttgcaaacttcatgcgtgtacatctgctgacctcacttggcgcattaaaagccggtatggatattctggtaaaagaagaaaaagtgcagattgacaaaatgcttggtcacggtggatttttcctgaccaaaggcgtaggacagcgtgtgatggcagctgcaatgcagacaccggtctttgtcatggagacagccggagaaggcggagcctggggaatcgcacttctggcagcgtatatgatcggaaaagcagagggacagacgttaccagattatctgaatactgttattttccacggggaagaaggtagcgtaatgcaaccggatgccgcagatgtggaaggttttgagacatttatgaaagattacaaagctggtcttgccattgaacgtgcagcggtagagcagctgcgctaatctggaattgtaatagaaataataaatcataacggatatacatggaaattttttgttatattttccacgcgatgttatataaagaagattttcatctcagtctgagttgagactcccacttctgca

SEQ ID NO: 13341 - DNA, 48327 bp, Unknown
  gut microbiota DNA sequence
gtatatcggaagaatggaggaattttgacatgttggaagaattaaaaaaacaggtgtacgaagcaaatatgctgcttccaaaatatggtctggttacatttacctggggaaatgtcagcggcattgaccgggaatccggattatttgtcatcaaaccaagtggtgtggaatatgaccttctgacaccggaagatatggttgttgtggatttgcagggaaataaggtggaaggacgttacaatccatcttctgataccgcaacccatgtggttctttataatcgtttcccgaatatcggcggaatcgtacatacccattcttcctgggcaacaagctgggcacaggcaggacgcgatattccgtgttatggaacgacacatgcagattatatttacggagaagttccatgtgtgcggaatctgacaaaagaagaaattgacgaaggttatgagcataataccggcgtcctgattgcagatgagtttgaacgccgcaaaaaagattacattgcagtacctgctgtattatgcaaaaaccatggtccgtttacctggggcaaagatgcaaacgaagcggttcacaatgccgtagtattagaagaagttgcaaaaatggcagcacgctgtgagatgatcaatccgcagaatcagccggcaccgcaggaattacaggacaagcactattacagaaaacatggtgcgaacgcatattacggacagaataattaacaaaagtgaaactatgaaacataaacaatatttatgaggaggaaacatactatgattcagcagaaagattacaaattttggttttgcaccggttcccaggacttatacggagatgaatgtcttgcacatgtggcagaacatgccaaaattatcgtaaatgcattaaatgcttccggaaaccttccatatgaagtagtctggaaaccaaccctgatcacaaacgcactgatccgtcagacttttaacgaggcaaacaatgatgagaactgtgccggagttatcacatggatgcatacattttcaccggcaaaatcatggatccttggtctgcaagagtacagaaaaccgttactgcacctgcatacacagttcaaccgtgagattccgtatgataccatcgacatggatttcatgaatgagaaccagtctgcacacggcgaccgtgagtttggtcatattttcagccgtcttggtatggagcgcaagatcgtagttggttactgggaagatgaagctgttcagaaaaaaatcggttcctggatgcgtaccgcagttggtgtggtagagagcagccacatccgtgttatgagaatcgctgacaacatgagaaacgtagccgttaccgagggtgacaaagtagaagcacagatcaaattcggatgggaagtagatgcttatccggtaaacgagatcgcagaggcagttgccgctgtttctcaggcagatattgatactttagtagaggaatattacagcagatatcagattctgttagagggcagagatgaaaaagagttccgcaaacatgtcgcagtccaggcaggcattgagatcggatttgagcgtttcttggaggagaaaaattatcaggcgatcgtaacacatttcggagatctgggtgctctgcagcagcttccgggactggcaatccagcgtctgatggaaaaaggatacggtttcggtggcgaaggtgactggaaaacagcagccatggtacgtgttatgaagattatgactcagggcataaaagatgcaaaaggaacttctttcatggaagattatacatacaatctggtttcgggaaaagaaggcgttctggaagctcatatgctggaggtttgcccaagtatcgcagatggtccaatcagcatcaaagagcagccgttatccatgggtgacagagaagatccggcacgtctggtatttactgcaaagacaggtccggcaatcgcaacttccctgatcgaccttggcgaccgctttcgtctgattatcaacgatgtagactgcaaaaagacagagaaaccgatgccgaaacttccggttgctactgcattctggacaccacagccaaacctgatcacaggtgctgaagcgtggattctcgccggcggcgcacaccataccgcattctcttatgatctgactgcggagcagatgggagactgggcagatgcaatgggtatcgaagctgtttatattgataaagataccaacatccgtcagctgaaaaacgagctgcgctggaatgcacttgcttacagaaaataaaacgaatttgaaaaagtaatgataaaataacaggaaaataccgccacaggttcccaacaacgctgcggcggtatttttctgggttaggaaagtgagagctttcccttcataaataggggaggataagttaaaaaaacttgtcttttgtgttcattttcattataaccggattgggaaaatatattcatgaaaatagaagcggattcgaaaaaatacagtttacaaacatggcgtgtatgagttatactaaaacatgcagtaaagcgcaatgatgaataaaataaataaaaggtggtaaacataatgggattattacaggattggcaggcagttgcctttaatgaaaatgcagacagaggtcagcttcagaacttctggagccgttactttgcaattgaaaaaagcgtatatgagaaacttctttccaacccggatgaggttgtagaaggaactgttaaagagctggcagagcgtttcgatattgaactgatggctatggttggtttcttagatggaatcaatgagagtcttgtagaggagaatgaccttgagaatttaagcgaagacagccatgtaagtcttgcttttgataaagagaaactttacaaaaacatggtagatgcaaaagctgactggttatacgaacttccacagtggaaagaaatcttctctgaggagaaattaaaacagttatacacagagcagaagaaatccggtactgttgtaaaagctgcaaaagtatatccgaacgatccgtgtccatgcggaagcggcaaaaaatataaaaaatgctgcggcagaaaataataatataagaaacatatcgatatccatgtgaatgattttgcatggatatcttttttatatagttacatatttatgtgtgatatgtctgcatattgcttatatgtttttcgatttatgagtgttatatgtgaattgtaatgctttttcttttttttagtttgtatattttttgaaaaaaggaagatactctttttgtatgaaatcaaaaggaggatcttacaatgacacaattagattgttctgtaacaagctgcctgtataatcaggatcattactgcgcaaaagaggatattaccgtgggtggatcaaatgcgaaaaaggcaagcgatacttgctgcgaaagcttcaaagagagaagtggtgcgccgagcaattccaccggatatgcgaccagtacggtaaacattgattgtgaagcaaaagactgtgtgcacaaccgcggatgcaaatgctgtgccgacagtgtggggatcggtggtggagcagatgcctgtcagtgtcaggacacagaatgtggtgatttctgctgtaaataagataagatgggaaagccgctgtaactatcctgtgtaaacagtaaccacacatgtagtctttgcaagcagggaacatgatggtaagatgttgttgcaggacgaaggttaagaattgcacatgttggaggaaacacaggatgcaagaagcgatggaattaaaagagatgatcaaacaggaacgaaaaatgctggataaggtagtggcggaatgtggggtagaccatgaggatgcctatgaccagagtaaaaaactggatgatctgatcacacgttactatgaggattaaagtacaaaaacgtacttttttgtgggaaaacgccccactttttggaaaaaatgtagatttccttaaaaaacactggaatcacgcgagattccggtgtttttttgtgcccggattatgaaaatgctattgatttttgcgaatagatgcattaatatttatataaaagtggatgaaagtggtgtaaaagggtggaaagtggataaggttgataactttgtggataactaagacaccgaatacgaaccagaaagaaggtgttttcgatggcgcgcggatttaagggcgaatacaatcatactgtagatgcaaaaggcagattgatcatcccggcaaaattccgcgaaaaactcggcgaaacattcgtagtaacaaaaggtctggatggatgcttatacgtttactcggatgaggagtgggagaaaatcgaagacaaattcagcgaattaccactgacagatgaagatgcacgtcagtttacaagattctttttctcaggagcagcagactgtgaagtagacaagcagggcagagtgctgcttccggcagttctgcgtgaacatgcgggaatcgagaaagaggccgtactggcaggtgtacttaaccgggtagagatctggagcaaggaacgctggctcaagacaaaagactattcggatgtaaatcagatcgcaaaacacatgtcagagatcggtctgagattttaaccgaatcaagtaagtcccctgcttcaattgcgaaaagcaataagcagtgggtggggacttgcttgtatcaggaggagtgcaagctccttctgataaactgcggagcagttattcggttatgagcaagtagcgaagcggattgcgaatatccgcttgaccagaaagcaatagaaaggcgaaacgatggagttttctcatatatcagttttactggaagaaacagtcgggaatctcattacagatccggatggaatctatgtggacggtactttaggtggtgcgggacacagttatgagatctgcagcagactgtcagataaaggcagactgatcggaattgatcaggatgcagatgcaatcgcggcagcaacagagcggttgaagccatttgaagataaggtgacgatcataagaagtaattactgtgagatgccgcagcgactcagagagattggtattgagcaggtggacggcattatgctggatcttggagtttcgtcctatcagttggacgagccaatgcgaggttttacttataaggaagaaaatgctcctctggatatgcgtatggatcagcgtcagagtatgacggcaaaggacattttggcagaatacagtgagcaggatctttatcgtatgatccgcgattatggtgaagataaatttgcaaaaaatattgcaaaacatatcgtgcaggcgcgtcaggtggcacccatcgagacgacagggcagctaaatgagatcatccgggcagcaatcccggcaaaggtacgggcgaccggaggtcatccggcgaagcgtacatatcaggcaatccgaattgagttaaatcacgagttggacgtgcttcaggattctttagatgagatgatccagatgctgaaaccgggtgggagactttgcattattaccttccattccttagaagaccggattgtcaagacgaatttcaagcggaatgagaatccatgtacttgtccaccggattttccggtttgtgtatgtggaaagaaatcccttggtaagatgctgacacgaaagccaattttaccgacagaagaagaaatggaatacaataaacgttctaagagcgcaaagctgcgtgtatttgaacgaagataataggaaattagaaagaaagcgtgtagaagatggagaacagaaacagacaatatcgtcgtgaatcttatatcgatggaaatgtggtacgccagccggaacgtgcaccggagcgccgcagacaatatgaggagaaatccccggagcagctgagaaaagagcggatgcgccgtaatgcagcaagacagaatcaacagagagcattgtctatgaatcgtggatatgttgcttttcttgcgtgtgcaaccattgtctgttgcctggtatgtggcgtatttttatatttgcagtctgatgtaactaccagacttgcgaacattgcaaccattgagagcgagatcgctgatatgaaatcagataatgtggcagcagagaagcgtctggagaccacaatgaatcttgaccagatcaaggatgcagcaatcggtcttggactggttatgccggggagtgatcaggttcgttattattcagtagagaatagcgattacatgaatcagtatggggaaattccaacgaactaaagaggagaaagaatgagacccggaagaccaaaaaagtccagaaaaagagctggaaaaaacagaaacattacgtacaaatttctcaccagaatgaaggcgaagatgctgatcgtatttctgatcatcattggaatgctgattgctctggtgggacgtttggcttatattgaattaaaaagtggagacaagtatggcaagattgttctgaaccagcaggaatacagcagtaagaccataccgtttcgcaggggtgacattgtagatagaaaggggactgtcttagcgacgagtacagatgtttacaatgtcattttagattgcagcgttttgacttcgaaggaagattatatggaaccgacgctgtcagcactggcacagtgttttgaactcaatacagatgatatcagaacttatgtaaaggcaaacccgaagaagcgttattacgttctggcaaagaagcttccatatgaaaaaattgccgaatttgagtctctgcagaatgacaagaaaacaggaaaaaatatcaaaggtgtctggtttgaaaaggaatatatccgaaactatccgtatgacaccctggcttgttccctgcttggatttaccacatccggtaacgaaggtatcggcgggctggaagattattataatgatgaattgaatggcattgacggtaaagaatatggatatgtcaattcagattctaattatgagatcaaagcaaaagatgcaacggatggcaatacgatcgtatccaccattgatgcaaatcttcagtccatcgcagagagcaagattgcagaatttaataatgcaatgaaggacagtgagcatgaaggtgccaaaaatattggtgtcatcatgatggatccaaacaccggtgaagtgctggcaatggcaacgaacagaaccttcagtttgcaggatccgtggaatgcggatactgataagtattttaccgaggaagaacgggcaaaaaccatcaaacaggcagaacgtgtggaactgaaaaagtactacagcaccgatgaaattgatgctatggcagatgaacagtggagtgctgcgttaagtgaacattacagtgacgaacagttagagcagatccatcatctggcattattaaatcaggtgtggaacaacttctgtgtatcttccacctatgagcctggatctaccgcaaaaccatttacggtagccgccggactggaaagtggaacgctgaccggaaatgaaacattttactgtgatggtgcagagaccattgccggacatcatatcagctgtattaagaaagccggacacggcatggaaaccattcagcaggcgctggaaaattcctgcaacgatgccctgatgcagatgtcttatctgatcgggccggcaaatttcagcagatatcagcagatctttaattttggactgaagaccaatattgatctgccgggtgaagcgcgtactgattccctgatctatacagaagatcagctcagtaccatcaaccttgcaaccaactcctttggacagagttataacgtaaccatgatacagatgatcactggttactgttctctgatcaatggcggaaaatattatcagccgcatgtggttggcaaaatacaggatgcaaatggcaatagcgttcagacgattgatccgacactggtaaaagagaccgtgtcagaggaaacttccgcaacaatccgccagtatttaaaaggcgttgtagataacggttccggtaagaaagcaaaagtggatggctattccatgggcggcaagaccggtacggcacagaaattaccgcgatccgcaagaaaatatctggtatcctttatcggctctgtaccggcagaaaatccacaggttgctatctatgtcgttgtagatgaggcaaattcagaggatcaggcacacagctattatgcacagagtattgccagagaaattttaaaggaagcgcttccataccttggcatctatccggatgaagagaaaaccggtatcaatgaaggtgttggtattaccggtgagggaaccccggtagaacagacagaagctatggacagtgaagtgccgacagaagcaccgaccgataccaccggtcagtaaaaagttttgaatttcttttatattagaaaaatagaaacagtcagaattattgtggaaaagtagaaaaagggaatgtgcagtatgtgtgtggaataaagtgtaataagtatgctttaaggcacacaattatgcggcatttgaaaaccttccagagaaaaaagattgttgcattgatgctgatgatcaccattgtgatggcagcgttgtttggaagactgatctatcttatggtatttcggtccgtctattatgaaaagatcgcacaggatctccatgaacgggagcgcagtatcaaagctgcccggggaaaaatcgtagaccgtaacgggatcgttctggcagataataaatcggtatgtacgatatcggtgatccacagtcagatcgaggatccggagcgcgtgatcgaagtgctgcaaaaggaactggaacttccggaggagacgatccgaaaaagagtggaaaaaaacagttccattgagcggatcaagacaaatgttccaaaggagaccggggatgcaatactggcatatgatcttgcaggtgtaaaagttgacgaagactatcgacgttattatccgtatgattcactggcgtcaaaagtcattggatttaccggtggagacaatcagggaattgtgggactggaagtgcgctatgatgaatggcttgcagggacagacggcaagatcctgaccatgaccaatgcctccggtggagaattggagcaggaaggggaacgccgggaggaaccgcagaccggaaaccagctgaccatcagtctggattacaatctgcaaagctactgtgaacaggcagcacagactgtattgcaggaaaaagcggcagatggtgtgcggatcatcctgatgaatccgcaaaatggtgagattctggcaatggtaaatgagccggaatacaatctgaatgagccttttaccttaaacacagatgtttcaggaatatcggataaggaaaagcagaatctgttaaatcagatgtggcgcaatccaagcatcaacgacacctatgaaccgggatctacgttcaaaatcattacgacggcagcagcgctggaacagcacgtattatccgtcagtgaccgtttctactgtccgggttacaagatcgtggaggatcgcaggatccgatgccataagacaaccggacatggagcagaagattttacccagggaatcatgaattcctgcaacccggtttttattgaactgggactgcggcttggcgcagatgatttttaccattattttgagcaattcggtctgttgtccaaaaccgggatagacctccccggtgaggcagcaacgattatgcataagaaagacaacataggacaggtggaactggctaccatatcatttggccagtcgtttcagatcacaccgattcagcttgtgaccactgtagcttcgctgatcaacggcggcagacgtgtcacaccgcatttcggtgtttctgtgcagaatgcacagggagagacgatccacacattttcctatgatactacagaggggacggtgagtactgaaacatccgaaacactccgcagcctgctggaaaaagtcgtgtcggaaggaaccggaaaaaaagcggcgattgaagggtattccatcggtggcaagacggcgacttctcagacgcttccaagaagcgaacataaatatatcgcatcttttcttggatttgcaccggcagaggatccacaggtcattggacttgtcgtgatcgatcatccacagggagtgtattatggaggaaccgttgcggcaccggtgatgaaagaaatattcgaaaatgtgctgccctatctgggaatcgaaaaagtgcagacagaagccacggatgcaaatgaggaagggaattgatgtcgaacttattttgcggttgccaaacaaatcgaaaagacgtatgatactaattaagttgtaaaaaaagatacagtcggcattgggagaatgccgcagtaagaagaggtgtgaaaatgacatatcaggtaattattccggttctggtagcatttgcgatcacagcagtacttggaccgatcatgattccgtttttgcggaaattaaaaattggaaatacagagagagaagaattacagtctcatcagaagaaaaatggtacaccgactatgggtggaattatgattctgattgcagttgtgattacttccctgttttatgtaaaaggatatccgaagattattccgatcctgtttgtaaccgtgggatttggaatcatcggttttctggatgactatttaaaagttgttctgcgcagatcagacggactgcttgcatggcagaagatgctttgtgagatcgttgtgacagcagtttttgcatttttcttagtgaaaaatgagattccgatgtctatgctgatcccgtttagcggaggacgttatctggaacttggatggctggcacttccggtactgtttctggcagtgatcggaaccgtaaatggtgtcaactttacggatggactggatggtctggcttccagcgtaacaattctggttgcaacatttttctctgttgtagccgttggaaatgcctgcggcatagcaccggttacctgtgcggtagtgggcgcattacttggatttttattatttaatgtatatccggcaagcgtatttatgggagataccggttccctggcattgggtggatttgtggcggcaacagcgtatatgctgcagatgccgatctttatcctgatcgtgggactgatctactggatcgagatcttatcggttatgatccaggtcgtatacttcaaaaagaccggtggtaagcggttcttccgtatggcaccgatccaccatcattttgagcttggcggatggtctgagacacgggttgtagcagtattttccattgttacagctattttgtgtctgattgcatttattggattataaagagatttactatactatacatcaaggatctggaggaatgttgcaatggaatttgcaggaaaaaaagttctggttttcggaacaggaatcagtggaattgcagcggcaaaattactggaaaacgttggtgccgcagtcgtattatttgacggaaaccaggaactggataaaaaacatgtgctggaaaattttgaggcagatcatatgccggaattatatgtaggtgaattaccggaagaagttcgtgcaggactggatctggttgtattaagcccgggtgtaccgacagatcttccgtttgtcaatgaactgcgagatgcgggacttccaatctggggcgagatcgaactggcatatcgatgtaaaaaaggtgatgtacttgcgattaccggaacaaatggaaagacaacgaccactgcactgcttggagagatcatgaaaacaacgtatccgcaggtgcatgtggtaggaaatatcggaattccttacactggtctggttgcagaagatacggatgataccgtgacggtagcagagatcagcagctttcagttagagacgattgatactttctgtccggaagtatccgcaatcttaaatattacaccggatcatctgaaccgccaccatacgatggataattacatcgcggcaaaaatgagcattgcaaaaaatcagggaccggagcagacctgtgtattaaattatgaagatgaagtgctcagagagcaggcaaaacatctttcggcaaaggttgttttcttcagcagtctttccaaattagaggaaggcttctatctggaaggtgacaagatcgtgtatgcacatgatggtcagattgaggaaattatatctacagatgagttgaatatccttggacgccacaatcatgaaaatgcgatggcagcgactgctatggctatgagttatggtgtcccggtggagcatatccgtcaggctctgcgtacatttcaggcagtagagcacagaattgagtatgtgacagagaaacgcggtgtccgtttctataatgattccaagggaaccaacccggatgctgctatcaaagggattcaggcgatggatcgtccgacctgtctgatcggcggcggttatgataaacagtctgagtataccgagtggatcaacagttttgacggtaaagtaaagaaactggttttgatcggtcagacaagagagaagattgccgaggaagcagaaaaatgtggcttctacgattatgtatttgccgacagtcttcaggaggcagttgatatctgctatgaaaatgcggaaaatggtgatgccgtattactttctccggcttgtgcaagctggggaatgttcccgaactatgaagtaaggggaaaaatgtttaaagaaatggttcatgccttaaaggagtaatgttacatgggtaaccgcaaatatcataagaatactgcggatgcgggaacaaccaaatattttgattacagtctgctgtttattatcatttttctggtgctgtttggactggtgatgctctacagtgtcagtgcttatgaaggtcaggatgtgttcaatgatccatttcactacctgaaacgacaggcaggctgcgcatttcttggattcatcggtatgtttatcgtcagtgtgattccatgcgaatggtggaaaaagctgagttttccgagttatgtgctgtcatttctgatgtgtgcggcggttattgtagtcggaaaaggttcgaacggttctacccgttggctgaagatcggaccgattcagttgcagccgtctgagattgcaaaaatagcagtgatcatttttatggcagcgcttttaagcaggattccaaaacaggtcaaagatctgaaatccattatcaaggtactgctttttgttctgccgatggtaggtgtgatcgcagttagcaacttgagtaccgcaatcattgtcggtggtattgccgtacttatgatctttgtggtcagtccgaagacaaaggaatttttcgttcttggagcaggtctggtcgcattgggagccatcggtgtaaaaatgggtggttatcgtgtgacacgtattgctgcatggctgcatccggaagactatccggatgaggtgtatcaaacgctgcagggaatgtatgccatcggttccggcggtttgttcggaaagggacttggtgccagtgtacagaaacttggttatgtaccggaggcgcaaaacgactttatttttaccattatctgtgaagaattgggactgtttggtgcaatctgtgttattttattatttgtcttgttgctctggcgctgcatggtgatcgcaaataatgcaccggatctgttttcttccctgctggtggtgggtgttatgtcacatatcgcattgcaggtagtgttaaatatcatggttgttacaaactggatgccaaatacaggtattatcctgccgtttttcagttacggaggtacgtcgatcctgattttgatcacggagatgggcttggtactgaatgtgtcgcgtcggatcaaatttgattccaatcatccgatcgagtgatgtgatctgacagtaaaaagacagaggatcattgaaaaaattggaatgattcagaagaaaaagtctcaaattagattgggaaagtgttaatatgattcagcactttggtaagattctcaactcagactgagataaaatgtggagaactgtatgcgtagaaagagacgaaaaaagaaaaatttacgtatcattctgactgctcttcttgtagctgcatttgtagctgcattgggagcagttttgatatggaaagtatttgtggtaaaagatgtttccgtaaaaggaaatgagatctatacggacaagcagattgaggactgggttttggatgaaaaatattcctggaattcactgtatgtttattttgaaaacaaactgaataaaaccgaggagatcccctttgtggattctctgcagatccggttgaaatcgccgcagaagctggagatcacagtggtggaaaagggaatccttggatatctgtacattccgtcactgggaaaaaatgcatattttgacaaagatggatttgtggtggaactttcctctcaggtgatcgatggtgtgaccaagatcaacggtttatctgtggaaagtgcagaactttacaaaaaactttccatcggtgataacagcaaactgcttcgtaccctgttaaatgtgacacagcttttgaagaaatatgaccgggtgccggaaatgatctatatcaaagatggcaatgtttatctgatctatggtcagattcaggtaaaccttggtggaggaacggatctgaatgagaagatccttcgaatggatcagattctgccacagcttgacggaatgagtggaacgctgcatgtggaaacttggtcggagaacaatacggatatttatttccgaaacggggaactgatggagatcccgaatgatgtgcagactgttccggaagcgtcagatggatctgcggatggtagtcagtaggatcgtatcctcttttttgaggatgaatcacatttctttataagaaaatgaattcagaaattggattacttcttcttataatggaatttataatggaatgaattctggaaaattcagattaaatatgatttagaggttgattatttttgcaaaaacagatattatagaagagataataaaaatagtggcaggaatgtcgttaaagatagtataaatatattccgtgggaggaataaaaggaggaatatcgtggttgaaatcatgtcaataggggctgagtccagcgcaaaaattattgtaatcggagtaggcggcgctggaaacaatgccgtaaaccgaatgatagatgaaaaaatcggtggtgtagagtttgttggagtaaatacagacaagcaggcacttactttatgtaaagcaccgactttgattcagattggagagaaactcaccaaaggacttggcgcaggtgcacagccggagatcggtcagaaagctgcagaggaaagcgcagaagaactgacagcagcaatcgaaggcgcagatatggtatttgttacctgtggtatgggtggcggaacaggaactggtgcagcaccagttgttgcgaagattgcaaaagatatgggaatccttaccgtaggtgttgttacaaaacctttcaaatttgaagcaaaaacacgtatgacaaatgcagtacatggaatcgagaatctgaaagagagcgtagatacgctgatcgtgatcccgaatgataaactgcttgagatcgttgacagaagaaccacgatgccggatgctctgaagaaagcagatgaagtattacagcaggcagtacagggaatcacagacctgatcaatgtacctgctctgatcaaccttgactttgctgacgttcagactgttatgaaagacaaaggtctggcacatattggtatcggtggagctaccggtgatgataaagccatcgaggcagttaaaatggctgttgcaagtccgttgcttgagacaaccatcaatggtgcatcccatgttatcatcaacatttccggtgatatttctcttatggatgcaaatgatgcagcaagctatgtacaggatcttgccggtgatgatgcaaatatcatctttggtgcaaaatacgacgagtctattccggatgcagcaaccatcactgttattgcaacaggtctggagaatgccgcagcaccggcaccgtctattttaccgggcatgaaatttaatggtggcaatactttgaacatggcacgtactgctggcagcgtaaaaccggcacagacaggcacaactccggttcagccacagttcaatggaatccagcgtccgcagaaaccaacaccaaccgttgctccgcgtgacatcaagattccggaattcctgaaaaatacaaaacgctaatcattcgaaaatagaatattatggtaataaactccgcgatttcgacaaaaaaatcgcggagttttttgtatactgttcagggaggtgacaagtggagtatgaatggtatgcagatgtttttcttttaacaaacctgttgatggatatgagtgccatgtttgccgcggcgcttttgctcaacgacagactacggttgggacgttgtctggcagtctgtgtggcaggggtgacaggctccacagtgttgctgatactgctgaaaaaatatctggtctacagtatcattttacatatggtaatccatccgctgatgacgtttggggtatttggggcaaaagaccgagggcggtttttacgcacgcttttgaccatttatctgattttgtttgtgatgggtggggtgcagaacagtattggggtgttgcttggaagcagtacattggaaatcctgttgtccgggatggcagcggcacttttgttttgtatctatcagatccgacggcgtgtcatccagcagatctgtcgggtggaactgtgggcagggacagaacatgtcacggtagatgcttattgcgataccggaaatctgctgagagatccactgacgggaaggccggtctgtattttgcaacaggaagtgttagcgcaatttgctgctgaccgaacaatacaaaaagagatttcctgtcacacgatcggcacagaaaaagaaaaactgaaaattgtgatgttggataaaatgaagatttatcagaaaggtacggtaacggagataaaggagccggaaattggtctgcataccggggagattatgcagaatccgaaggtacaaatgcttttacatgcaggctatatcagatgagagggcagattacagtgattctgagaagaatatgtcagtttacgctgaccaaaatcacgcactaagttttacgtgcgttcgacttgaacggatatagttttcaaccggagtgcagaggcactctggaagtaagagaagaggagaaaaagaaaagagcatggaaaggatctataagtatgtatttaaaagtttccgtacctggaaaattccaactgaaattaataccaactgtgcagaatctgctgtttttgcagtcaaatgatattcattatatcggtggcacggatgtgcttccggcaccgttagaacgggaggatgagaatgagtgtatcatgctgcttggaacggaggagggcggcgaggaagccagaaaacggctgatcgagcataatctgcgcctggttgtatacatagcaaagaagtttgataacacgggaatcggggtggaggatctgatctccattggcacgatcgggctgatcaaatccatcaacacgtataatccgggaaaaaatatcaaacttgccacctatgcgtcacgctgtattgaaaatgagattctcatgtatcttcgccggacgagcaagatgaagatggaagtttcttttgatgaaccgttaaatgtcgactgggacggcaatgagctgctgctttctgatattcttggaacagaggatgatattatttataaagatatggaagtagaggtggagaaaaagctgttaaaacgtgccatcgacaagctttctccaagggaaaagaatatcattgaacttcgctatggtctgacacccggtggcagagaatatacacaaaaagaagtggcagatcagatgaatatttcccagtcttatatctcacgtctggaaaaaaagatcatgaagcggttgaaaaaagaaattacccgttatgaataacccacttgggtaaataagaagaaaaggttacaattttattaagttttgccggaaaggttgatgaaaaataaaaatgagttacaatatgagatgattaagccaaaaagacagggtaaattgaaattagatacaaaggaagtaagaatcgtgcaaaagacaaaattaagacaggaattaaaaagacagagaacaagtcagaaacgtttccgcagaattttatatctgattattgcggctgcaatcgtgatctacattgcaggaaccgtgtattacagcaaacatttttattcaaagggaacagcgttcggaattgctctgcgcaatgaaagtgtggcatctgtcaaggaaaaaatcgaagaaaaaatgaatgcctacacacttacggtatccgccagagatggggaggagaccatcaatgcatcggatatcggactgaaatatgatgacaaaaaggaactggatgatctgtttaaaaaagaaaaaccatttttgtggtttttgatggcagcgacttcagaggaagaaattgatctggatatttccgtagatgagcagaaattggatgatgagatccagaaactttcctgcatgcaggatgagaacatgacagctccgacagatgcacatctggaatattccgatggggaattcaagatcgtggatgagacacatggaaatcagctggatgtcaataaggcagagcaggtgatcgagaccgctgtcagtgagggagcatctgaggtttcattggataaccaggattgttatgtaaaaccgagtgtatacaaggatgatgaaaaattaaaacaggaatgcgatgatgcaaataaaatgcttgtcgcagagattacctatgattttggcgatcggacagaggtggtggatagctccgtaatcgcagactggattacatttggtgatgattatacctttgatttggatgaggataaaattacggaatatgtacatcagcttggattgaaatatgatacgtttggtttgagcagacagttcaaaacacatgatggtcagacaatcacactgaaaggcggtgattatggctggtgtatcaataaaaagaaaacggttgcgcagttaaaggaactggttttgcagggggcaaaagagacagtagagcctgtatatctgtatagtggtgtctgccgtgatacgaatgaccttggcagtacttatattgaggtaagcattgcggcacagaccatgtggctgtacaaagacggggaatgtattgtatccacaccggttgtaaccggaaatgtatcagccggacacagcacaccgtccggcggtgtatgggcaattgatgcgcgtatgacaaattataccctgaccggtcaggactacaactctgaggtatctttctggcttccgttcaatggagatgttggaatccatgatgcttcctggagaagcgagtttggcggcagcatttacaagacacgtggttcccatggctgtgtcaacacaccgtataatgccatgaaaaccatttatgagaatgtcaagatcggttatccggttgtggtttattaattgccatcagatgtgggaaacaagtttatgtcagtggaagagataaatgctccgcgagggcgcatattgtctgggagacaatggttttgcgccgaccggaacggagtgtagagtgcagtgattctgaaaagaagatgtcagcttgcgctgaccagaatcacgcaccaagtcttacgtgagttcgacttgaacttctacctgatatgggcttcgggctttgatgtatgataaacagaggttttggaatgtaaggagaacgtatgaaaaaagcagaaaatccgaagaaaaagaaaggtggaaagctgacactggtgattattgtgatcgcactggcagtcatggcatttgcacttttcaaaattgctcagatctacaaggactatcaggaatccgagcagacatttgaaaaactggaagaaacctatgtggtcaatccggatggaagctccgtgacagaggatgactggaatgatgataccagaatccagtttgatgcgctgaaaaaagaaaatccggatattatggcatggctgcggtttgacaatttcgatgatgtacatatcagctatccggtattgtattccggggatgattccaaatatctgagaagcgatatttacggaaactatcatattgcgggctgtattttcctggagggactgaataatccggatttttccgattatcattccattatttacggacataatatgagaaataccacgatgttcggtgaccttaagcgttataaaaacgatgaaggattttatgaaaaaaatcagttttttaatgtttataccgcggataaagtgtaccggtatcagattttctcctactatgatgtggatgaggacagtgatatctatactgttggttacggtgcagatgacagctggcaggcaatgatcgataagatggttgcttcctctatgaaagatacggggattcatccgaccaaggaggataaagtggtgacgctgtctacctgtagtaaggctggggagaccaaacgtttcgtggttcatggagtactggtcgatgtgaaaacacattaaaagttttttgggacttttagggtggcttaaaatttacaatttaattttttgaaagaacttctgcaatttgtttcagtcgctaacaatcgctccttgaaaaaaattgcagaagttcttgttttacacagagcttttcgtaaatttttgcgccaccatagagcacttaggttgtcatgaggtaatttcgcatggtttttaacgcggatttttcgagtcggctgacctgtgcctgagaaatatgaatttctttagctacttccatctgggttttaccctcaaaaaagcgcagatctataatatgtttttcgcgtttattcaaacgtttcattgcatcgctgagtgagagattttccacccagcgatcttctttgtttttcttgtcgctgatctgatccatgacgtaaagtggttcaccgccgtctgtataaacgggatcatagagactgaccggtgtttggatggcatccagtgcataggtgatgtcctctttggaaatatcaatttctttggagatttcatccagtgtgggttcccgattgttttttttggtcataagctctctggcatgaatggctttgtaggcggtatctcgcagggagcggctgacacgcaggctgttgttgtctctgagatagcgtcggatttccccgatgatcatgggaacggcataggtggaaaattttacctccatagtaggatcgaaattgtcgatggatttgatcagcccgatgcagccaatttgaaacagatcatccacattttcgttggagacggaaaaacggcggatcacacttaaaacaaggcggagattaccgcggatgtattcttcccgagcctgttggtcaccctgccggatgcgggtaaatagttcttttttctggttttcattcaaaacagggagcgtggatgtgttgacaccacagatttcgactttgtatgctggcatgtatgggttacctccggaattgtttgatgcaaattcaagaatgcccttggcatttcacatctgatgtattaacagcttgcaccaaaacagaaaaattattccgaagatggaaaaacaaagaatggtaaaattgggaaaaagaatacagttgttttttgtgagaatgctaatgggtacaaaagtgatttgcaacggttgtttgggatggaatgtgatcttagttacaaaatgcggttcaggtttaaaaatgtggctcaggtcgttgcacaacattaaaaatgatgttagaataaaaacaattgtcaattagaaagattgaaaccgggaggtacacatgaaaaaattattagataatattaccgctgaggtaacaaaagcttttgtggaagccggatacgaagaaaaattcggcaaagttacattgtctaacagaccggatctgtgtgagttccagtgtaacggagccatggctgctgcaaaacagtataaaaaagcaccgtttatgatcgcagatgacgtggcagcacgtctgcaggatgtggagatgtttgcatcggtagagtctgtaaaaccgggattcctgaacctgaaattatctgaggaatatctggcagagtatctgcgtgaaatgcaggcagatgagcgttacggctgcgagaagacagcagagccgaagaccatcatcgtggattacggtggagcaaatgtagcaaaaccgctgcatgtcggacatcttcgttccgcagttatcggtgagagcgtaaaacgtatgagccgttacatcggtcacaatgtcatcggtgatgttcatcttggtgactggggacttcagatgggactcatcattacagagcttcatgagcgtaaaccggagctggtttattttgacgaggcatacgaaggagaatatccggaggaagcaccgtttaccatctctgagttagaggagatttatccgactgcaagtggaaaatcaaaagaagatgcagcttacaaagaagcagcaatgcaggctacttttgaacttcagaaaggcagaagaggttacatcgcactgtggaaacacattctgtctgtatccatcgcggatctgaagaaaaactatgacagcttaaacgtttctttcgacctctggaaaggcgagtccgatgcagatccatacatcgcaccaatggctgaacagatgaagaaagatggttttgcatatatgagcgagggcgcactggttgttgatgtcagcgaggagaccgatgcaaaagagatcccgccatgtatgatcttaaaatcagacggagcatctctgtatacaaccacagaccttgcaactatcgtatggcgtatgaaagattatcatccggatcagatggtatatctggcagacaaacgtcaggagcttcattttgtacaggtattccgctgtgcaaagaaaacaggtctggtagatgacaacacagaactgaaatttatcggctttggtaccatgaatggcaaagacggcaaaccgtttaaaacccgtgagggtggcgttatgcgtctggaaaaactggttggggacatccagaatgagatgtatcagaaaattgccgagaacaacaccatggaaaaagaagaagcagaaaagactgcaaaacaggttgcattatctgctatcaaatacggagatctgtccaatcaggcttccaaagattatatctttgatattgaccgatttatctccttcgagggaaatacaggtccatatatcctgtataccatcgtgcgtatcaaatctattttgaaaaaatacgcagagagcggaaaatcagcagcagattacaccattcaggcagcacattctgcaagcgagaagaacctgatgctggagctggcacgttttaatgaagtaatgacaaatgcagcagaggaacttgcaccgcacaagatctgtgcatatatttacggactggcaaatgcgttgaaccatttctatcatgagacaaaaattatggtagaagaagatgtggctgtacaggctggttatatccgtctgttagagttgacaagagacgttcttgagacatgtatcgatgttcttggattcgatgcaccggagaagatgtaagataacaatttataggaaaaaacgatagttttaaatgaaaaaagttttacacaatgctttataaaaagatgtgtaaagctttttttatacatataatacagaaacaaccgcacagaatatagaatttcttaaatgggtagaattttttagaaattagtatagatgattaagaaacggtgccgcacaaatatgttgtataaattatactcgtgtggcaccgtttggcttgagttatatgccatcaaatacaggttgaaaatatgagacgctgataataaaagagtatgaccaaacaaaagacgatcaacagaagaaagttgatcgccttttgttttttataaaattgtgtaatgtgatttcgaattgtctaatgtgaaataatgaaacattcactaatagcctagttcttcgccaacgagaatcagtttaatacgtcctttgatagcacttcttcttgtaataacagtatggctacagatgcatccttctgaaaaacagtcatggcagcttccggtcagcgcacatggtgtgttgcggtccagacggatggcatttggcggagaagcgatattttttactctggattcagcttcttccaatgtggcagcaactttattcatgccggcaatgatgattacattttctggtccatagattaaagcggctacacggtttcctgtaccgtcagtattaactaactgaccgtctaatgtgatagcatttgtactcatgaaataatagtcacaggacagagccttgtggtaaatctctttaatctcctccggggaacaggctttggaacgatccagtaatgtgatatcgtctcttttttgcagagcgtccatcagaccacattcgttcatggtcatggaaccgccgaaagatacgctggaacctggtgttacataggaaagagctttttttacggcttcttcgcttgtttcgcagtaacatccttcgtagccgcggcgttcaatgtttttcagaatcgtttctgcggcaactttataatatttctgttttcgtgtcataaaataacctccttgctgaaatactgtgttaatctacagtgcaaaaaaggagaacactgcagaatttttacagtattacaatatgtataaaaatatagtgaaccaatcaggaaagaaagtcaagagatgtgagaattgttagaagagccaaactttttgcaaaaaagttggggaataagagtactagtggtttgactttttttgcatgggtgtagtatattagactacagtttaaatgataaggggaaaacgaatgaggaaaaatttaaagaaattgttctcatattataagccatatatgggaatttttattgcagatatgttttttgcatttggcgcagcggcggtatcgctggtgattccgttagtggtgcgttatatcacatctgaggttgttcattgggaaagcagtcaggcgctgcacacgattttacgactgggcgtgatcatgctggtactgatcgctgttcagtgttactgcaactattttatatcgaattacggacatgttatgggcgcaaagatcgagtacgacatgcgtgcagagattttttcacactatcagaaactgtccttccgtttctacgatgatcagaaagtcggtcagttaatgtcccgtattacatcggatctgtttgatattacggagctattgcatcacggaccggaaaatatcgtgatttcgctgattcgcattatcggtgctttcattattatggtaaatatcagtccacggctgacagtggcagcatttgcactggtgccgtttatgctggtgtacgcttatgtgttcaacaaaaaaatgaagcgcgctttccgtatgaaccgtgtgaaaattgcagatattaacagtcagattgaggataatctgtctggaatccgtgtggtaaaatcctttgccaatgaggaaattgaaaataaaaagttcaaaaagggcaatgacggatttctggatgcaaagaaaaacagttatcggtatatgggcggttacaatgccggcttgactgcgtttacaacagcaattaccgttgttgtcatgttgtctggcggtgtgatgattgcccgtggaaaaggaaatatcacggatctgatcacatttttgctgtatattaatgtattcactgagccgataaaaacgctgattgattttacggaacaattccagaatggttattccggatttgagcgttttatggagatgatctctgtggtgcctgatatcaaagatgcgccggatgcgcagccgatgcaggaagtgaaaggtgaaatcagttttgaaaatgtgtcctttcattatgcagacagtgatcagatggtgctgaaccatgtaaatctggaagttccggcgggagagtatgtggcgttggttggaagctccggtgcaggaaaaagtacgctgtgcagtctgattccgcgattttatgatgtgacaggcggtacgatccgggtggatggtcaggatatccgcaagatcaaattgtcggatctgcgcaatcatatcggaatcgtgcagcaggacgtgtatttatttgcggggacgattctggaaaatattcgctatggaaaaccggatgccagcagggaagaggttatcaaagcggcaaaagaagccaatgcccatgaatttatcatgagtttcccggatggatatgatacggatatcggacagcgaggagtgaaattgtccggtggtcagaaacagcgtctgtctattgcccgtgtgttcctgaaaaatccgccgatcctgatttttgacgaagcgacatctgcattggataatgaaagtgaaaaagttgtgcaggaatcattggaaatccttgccaaaggacgtactactttcgtaattgcacatcgtctgtctaccatccgtaatgcagaacgtattctggtgctgacggaaaacggcattgaagagagcggtactcatgaagaacttgtggcaaaaggcggtatttatcagaaactgtgcgagatggcaaatcttgcacaataaagtctggaaaggaaaaaactattatatatgagcagactggaagtaaaaaaagtacaactgtccgataagacatggatggacgcctatctggatgcaaaacaggacaaaggctgtgacatgtgttttgcaaacatctatctctggggcagaaaatataaaaccggttacgcgatggtcaacgattgtctgatttttgcggatctgatggattttaacagcgtatccatgccgcttggcgaaccggaaaaagtaaaacaggcgattctgacgctggaggagtattttgcagaggatggcaaaccttttgcgctgcatctgacgacaccaaagaatgtggagcagttagaagaatggtttccgggaaaatatcaggtggagtatgagcgcgacctggcggattatgtatatgagagggaaaaacttgtggcattatccggcaagaaatatcacggcaaaaagaaccatgtgaataaatttaaaaatctgtatccgaactgggtgtatgagccgatcactgatgaaaatgtggaagactgttttcagatgggactggaatggcgcagaatcaacgactgtgaagaggatgaggaaaaactggacgaactgtgtgtgacgttcaatgcgttgcgtctgatgaaagaacttcatctgaccggtggtttgctgcggttggagccggatggcgatgtggtagcttttgccattggcgaagaattaaataaagatatgtatgtggtgcatatcgaaaaggcttttgcggatgtgccgggggcttatccgatgatcaaccagcagttcgcagagcatgcggcagaggggtatcagtatgtcaaccgtgaggatgacagcggtgtagaaggtctgcgccgggcaaaagagtcctatcaccctgcgtttatgggattgaagggatatgtgacacaccttgacaattcctgatttcagacttaaaataatctgtcaaagggtggaaatttaaaagctaagaaaggatgatataaaatgacaaagatagacattatttccggattccttggagccggaaaaacaacttttattaaaaaaatgctggaagaagttttctccggtgagaaagtagttctggttgagaatgagtacggtgaagttggtatcgacggcggattcttaaaggattccggtatcgagatcaaagagctgaattccggctgtatctgctgctctctggttggtgatttcaaccgcagcttaaatgaagtaatcgagacttatcatccggatcgtatccttatcgagccgtccggagttggcaaactttctgatgttatgtcttctgtaaaagacatggagaaaaatcatgatgtaaaattaaatgcactggtaacggttgcaaatgcaatgaaagcaaccaaacagatgaaagcattcggtgagttcttcaacaaccagattgaaaatgcaacaactgttgttttaagcagaactcagaatatgaaagaggaaaaactggagctttgcgtaaaagagattcagaaattaaatccgaaggctgctattattacaacaccttgggattctatttccggagagcagatcctgaaagtaatcgagcagcaggattctttgatgcaggaaatgatgaaagagtacgaagagcatcatcatgatcacgagcatgaacatcatcacgaccatgaccacgatcatgagcatcatcacgaccatgaccacgatcacgaacatgagcatcacgacgaccatgatcacgatcacgagcatgaacatcatcacgaccataaccacgatcacgagcatgagcatcatcatgaccatgatcacgaccacggcgaaggatgcacctgtggatgccatgaccacgatcatcaccatcacgaccatgatgcagatgaagtatttatcagctggggcaaagagactcctcataaatatacaaaagagaagatcgagtctatcctgaaaacattctgcgatactgaggactacggcataattttacgtgcaaaaggaatggttccggcagaagacggcacatggatctatttcgatatggttccgggcgagtatgagctgcgtgacggtgagccggattataccggacgtctctgtgtcatcggtacagatatcgacgagcataaattagaagaattatttgaactgaactaaaaacggattccgatatggcagtgcggtcagcattgctatatcggaaaaagttttcttttgaaaccacgcagaaagcaaaaattacagaaaagagagaaacgaataattatggatataccagtatatttatttaccggttttatggacagtggaaagacttccctgatcactcagacccttcaggagaatgattttggcatcggctcccgcagtctgatcattgcctgcgaagacggcgatgaagaatacgatgaagaagcactggcaaaagacaaaattacggttgtggcagtagagtccgaagaagaatttaccgaggaatatctgaaagagtgtgacgataccattaagccggatcaggtatttatcgagtataacggtacttgggaatcagccaaaattctggaaatgaaactcccgaaaggatgggaaatcgttcagtctctggccaccgtagatgcttctacatttgaactgtacctgacaaacatgcgtgccatgatgatggagcaggtgttcaataccgatgtggttatttttaaccgttgcaccgatgacacaccgaaagcaaaattccgcagaaccatcaaggctgtaaatcgccgtgcacagatcgtatacgagcgagaagatggtaccattgatgagagtgatgctgatgagcttccatatgatctggatcaggatgtcattgaaatcaccgatgctgactacggcattttctatctggatgtacaggacaatccgcagaaatacgaaggcaaaaccattcgtttcctgggacttgtatatagaccggacaaattcggtaaaaaaccgatgatggtaccgggacgttttgccatgacctgctgtgcagaggatattcagtttatcggtctgaaatgcaagtatgacaaagcagtggagattccgcacaaatcctggatttatataaccgcagagatccacaatgagtttgccaaggaatatcgtggaaaaggcccggttctgtacgcaaaagaagtcgtaaaagcagaagaaccggaagacagtcttgtatacttctcataaaatgtgagaaaaatgagaaaactgattgacaaaacttcaagaatgtaatagactaaagcacatataagaaaacaagttgaaaccgttgaaaaagagtagtaggctggagacagtgatgtcgaaccgattttcagagagctgccgttggtgtgagtgcagtatgaggagaaagctgaatggacttttgagggctgcctgaaatggatttgagagtagggtatgccgggagccgaacccgttatccagtcggtatgtatgaatacgtacataaaaagagtgggcgtcacgccaatttgagtggtaccgcgataataaatcagtttattaccgtctcaggataagtttatcctgggacggtttttttaaatcatgaaacatgaaaaagaggagagtaaaaagatgaaaaagagatttttagcaatggcacttggatgcgcaatggcagtaacagttctggcaggctgcggtggtcagtcaaacgatcagaaagatgcaggaaataccacttctgcaacagaagaggcagcagatggcaaagtttatcaggtaggaattgttcagtatgttgacgatgcttctttaaaccagatcgtaaaagctgtaaaagaagagctggatgcaaaaggaaaagagcttggtgtgacatttgattatgcaaatcacacatacaatggtcaggcagatgcaaccgttatgaaccagatcgcaagtgacctgatcaatgataacgtagatgcaattgttccggtagcaacaccggttgcaatggttatgcaggcagcaacagaagaaacacagacaccggttgtattttctgcagtatctgatccggttatcacaggtctggtagagagcatggataaaccgggcagcaacatcacaggtacatctgatatgctggataccgatgcgatcatggatctgatgctggcggcacagccggatatcaaaaaagtaggtctgttatatgacaaaggacaggattcctccacacagccgatcgcagatgcaaaagcatatctggatgcgaaaggaatcgagtatgttgaaaaaacaggaacaaccaacgatgaggtatctcttgcagcagacgcgctgatcgcagcaggatgcgaggcggtatttacaccaactgacaataccgttatgacagcagaacttgcaatttttgaaaaattccaggatgcaaaagttccacagtattgtggtgctgattccttcgcattaaatggtgcattctgcggatatggcgtaaattacgaagaacttggaaaagcaacagcagacatggtagtagatattctggtaaacggtgctgatccggcaacaactccggtacagactatgaacaatggtatcgcaaccatcaatacagacacagcagaaaaaatcggtctggattacagcatgtttgctaccatgtgcgagcaggtaaaagagactacaactgctcaggaatttgaataaaagcgggagcggaaactgattatgttatcttcaatttttacagtatcacttgcacagagtgcaattgaacttggatgtatttatgcgctggttgcgctggcgctgtttgtatcattttcaattttaaatattgcggatctttccacagatggatgttttactttaggatgcgctgtgtgtgccatggtaaccctgcagggtcatccgtttctgggacttctggcagcgaccggtgccggtgtaatctccggatttgtaacggcatttcttcagaccagactgggcgttgagtccattctggctggaattatcgtaaataccggtttgtataccatcaatattgcggttatgggattttcatccaccatcaatctgtttgccaacgatacaattttcacactggcaaaagacaaaattggtggaaactggtatgaaattattgctattctgatcgtaatcctgatcgtggcagttatcctgatctggtttcttggaacgagactgggactttctatccgggcaaccggtgacaatgcctttatggtaagagcttcctccatcagtccggtatttaccattaccgttggactgtgtgtggcaaacgctatgaccggactttccggcggactgctggctcagtatcagagatcctgtgatattaatatcggaaccggtcaggttaccatcgctctggcgagtctgatcatcggtgagacactggttggaaaaggacatgtggcaaaacgaatttttggcgtcatccttggaagctgcctgtaccgtttcatcgtggcaattgcacttcgattcaatgtcccagcagaatgcctgaaactggtatcatccattatcgtagcagtagcgatttctctgccgtatctgaaacagaaagcggcgtttgcaaagaccaaacgtgcggcaatcgcaaaaagaaaacggggaggtaatctgtaatgctccaattaatcgatatatcaaaaacctttaatccgggaacggtaaatgagaaaaaagcattgtctcatctgaatctggaattacaggatggtgatttcgcaaccatcatcggaagtaatggtgccggaaaatcaactatgttcaatgcaatctgcggaacattttttgtggatgaaggcgcagttattctggatggcagagatattacatatgaaaaagaacataagagaagcaaatacatcggacatctgtttcaggatccgatgaaaggtacggctccgaatatgagcattgaggaaaatcttgcactggcttatctgagggcatctgcctcaagaggaaagtttttcagcagaatttctcagaaagaaaaacagatgttccgtgaaaaacttgctttacttgatatgggactggaagaccgtatgaaaaatccggtgggactgctttccggtggacagcgtcaggcactgacacttctgatggcaaccgttgtaacaccaaaaattttgcttttggatgagcatacggcagcattggacccggcgacggcagaaaaagtattgaatctgaccaaacggatcgtggcagaaaacaagatcacctgcctgatgatcacacataacatgcagtcagcgctggatcttggcaatcgaactttgatgatgaactccggtgagatcgtgctggatgtcaaagaagaggaaagaaaaggtctgacggttgcagatctgttggaaaaattcaaggagggtgttggcgctcagcttgataatgaccgaatcctgttatcataaatgatccgagtgatcgggaattttgtgattgagaagaaaatgagagacataatacaaaagtaatattatacaggaatagaagaaaacataacaaaaaccggtgtctgagcaaaacagatgccggtttttatgtaagaggaagttaagattttcactcagaataaaaagcaatttggtggattttacataagcaatataataaaatataagaatgacataaagaataggagcagaaaaaagaaatccggcgttctgaagatcagaaaaccggatttctttttttacagatatgataattcgcttaaatgaattatttagcagcttctggtaaaagaattactaacatctgagctgttgttgttccgatgtttgtaacgctctttttagagtgcggtgcgatatgtacgctgtcgcctgcctcaagaacagtctcaactccgtcatcgcctttgaataacattgttccttctacaatgtagtagatggactccatagcgttgtcagcgaactctgtgccgccgccgcttggaaggaagtgagaaagaccgttgatcagtctaccaccatcgatatcctgcggatcatgaagtctgcataatttgcactctttgtgtcctggtgcctcataagtataataagcatcttttttagtaattttgtagccagccataatataaaaccttcctttctacctgacattttttacaagacatagtctaccaccatgtgagggaaaaatcaacaattttcatgtaaaaaaataaaaaagtgttagtagtaatgcacaaaaaggaaactgaattaccgtacagtaacttaataacaatattgtatgtattgcataaaaaagcgacatgaactatactaaacatgatgaatttgacgaacggaattttaggtttatccgtttcgccttgatccatctcagcttcttaatttagaaactgaaatgagaaaaaccaaaaggcaaaaaatgaaggaggattttgggaaatggtaagtttaaagaaagactttgtcgacaacatgttttctgtagaaggaaaagtagctctggttacaggtgcaactggtgcattaggaaaagttcttgctaaagcatatggttatgctggagcaaaagttatgatgactggtcgtaacgcagctaaattagaggagctggagacagagttcaaagcagagaatatcgactgcgcatacatcaaagctgatcctgcaaaagaggaagatgttgacgctttagtaaaaggtacagttgctaaatatggtgagatcaacattcttgctgtttgccacggattcaacaaaccacagaacatcttagagcagtccgtagctgattggcagtacatcatggatgctgactgcaaatctgtatacgttgtttgtaaatatgttgcagagcagatggttgctcagggcaaaggcggtaaagtagtagttgttacatctcagcgttctaaacgtggtatggctggatacacaggatactgtacatctaaaggtggtgcagaccttatggtttcttccatggcttgtgacctttccgctaaatatggtatcaatgttaactctctgtgcccgacagtattccgtagcgatttaacagagtggatgttcgatccggagtctgctgtataccagaactttatgaaacgtgagccaatcggacgtctggctgagccggaagatttcgtaggatatgctatcttcctttcttctgacgcttctaactacatcacaggcgctaactgcgactgcagcggtggttacttaacctgctaattattgtctttgacaataaacacagtcatgtaatgtggcgtacaaaaccatgattgcagacttattacacaaattaagaagagctcctgcccgccacaagcgggcgggctctgtaaatgattaataagacggagatgcaaaaataatgagtgaaattaaaaatttcttagtatgcggcggcggaatgatgggaagcgcaatcgcacagatccttgcaggacttgatgatgcaaaggttactgtatatgatgtattcccagtaaacgtagaagcaaaagttcgcaacaacatgaaacttcttgtagaaaaaggaatcgtaacagaggcagacgtagataacatcgtttccaaaatcagctttacacaggatatgaacgacgaaggcgttaaaaacgcacagatggttgttgagtgtgtattagaggagatggagatgaaacagaatctgttcgctcagttagaggagtatgtagcagatgactgtatcttctgtacaaatacatctgttatgagcccgacagagatttctgcaaaatgtaaacaccgtgagagactttgcggtacacatttctggaatcctgcattcctgattccgttagtagaggttgttaagacagatgctactacagatgaggttgcccagactgttatcgacgttttaacagaagctggtaaaaaaccggttctttgcaaaaaggatgttccgggatttatcgcaaacagaatgcagcatgctttatggcgtgaggctatttccatcgttgagcgtggtatcgcagatgcaaaaactgtagatgatgcttgcaaatacagctttggtctgagacttccatacttaccaccattagtaaactctgatatggtaagcacacagctgacatccaatatccataactatgtattaaaagatttggaagacagacatgatgcttctccattactgaaacagatgctggatgaaggcaaaaacggtttccgtgcagaggcagtagatggtgttcatgaaggattcatgaaatatacagacgaagagatcgcagagatcaacggtggtctgaatgagtatctgatcaagatgctttacaacaaataaatttaattatacaataacatggttcattcgtatcttcgggtaatgtgaaggtacatgaaatagacacactatattctattcaggaggataataaaaatgggaaaagtagtagtagatttagcacatccttttagtgcagagattccgcgttggccttactttgataaaccagaaatcgtaggcgcacattctatggctaaaggtggcgttttaacacagagaattacatgtacaatgcatacaggtacacactgtgatgcaccacgtcacgttatggagtatgagttcgatggcagacgtgctcgttacacacatgagatgccggctgatgcttacgctggacaggctatcgttttcaaaatcgatatcgagccttggggactgatcacagacaaacatcttgatgcatgtatgaaagagtacggccttaaagatggtgatctgaaaggaaaaatcctttgcctgaactctggaatgcatcgttacttcgatgattctaaagcttactatcattatgcagctggtacaggtatcgacgctggtaaatggtttgtaaaacagggcgttaaatgtgtagctatggacggacaggctctggatcatccgcttcacacagctatgggtaacaacggtatgacaagaatgaatcttcttggcgctacaggtaaaacaatcgttgaagagtacaaagagctctttggtgaggaagcttacgctgagttcgataaattcgagtacatccgtatccatggacaggaagcatatgatgagaaatttggcgagttagagaaccttggtgtatggggaacttgggagccatgtcataaagagatgcttggtcatggtattgttggtgttgagaaccttggtggtgatcttgataagatcgttccaggtaaatggttcgacttccactgctacccaatcagatggtacatgggcgatggctctatggctcatccggttgcttacgttgacgaagagaacattgatccgacagttccggatagaaaatacaaatactgtggaacaggttacggcgatgctgaagagtatggtcttagctgccttgactacatccagagactgttcaatcgcaacaaataattctggctggaattaccaaatgatataaaataagcccattgcagcaatgcagtgggcttattcagagcttataaaatagagatatattgtcaaatttttcaaaagttgctatgtcaatgtcttgacattcgaccagacatgacataaaatttaaatgtatgaatttataccatataaataagaaatgagggaatgaaaaatggcaaagaaaacaattatcacagcagcagtaactggcgcatggccaaaaaaagagaacaacccgaacgttccaatgactccacaggagatcgctgatgacgtatacgcatgctggaaagcaggcgctgcaatcgctcatcttcatatgagagatgatgaaggaaatggaacaatggatacagctaaattcgaagagactgtaaacctgatccacacaaaatatccggattgcgatatcatcctgaaccttacaacatctggagatatccacgctgatgacgagatccgtgttgctcatgttaaaaaattaaaaccagagatggcttcttatgactgtggttctatgaactggttaaacagtggattattcatcaactccccgaaattcttaacagattgtggtctgttattccaggagacaaatacaaaaccagagatcgaagcatttgatccgggtatgatcggaaacgctgcttactatatcaaaaaaggcgttctgaaaacacctgtacacttccagttctgcatgggatgtgcaaatggtatcccgggaacaatgaaaaacctgatcttcatgaaagagacagctgatgagttagtaggaaaaggaaactacacatggtcctgcttcggtgttggacacagcgcaatggagatgctgtacggtgcagtagcacttggcggcggaatccgtgtaggtatggaagacaacgtaatgtacgctaaaggacagcttgcagagagcaacgttcagttcgtagagagagctgctcgtgtaatcagagagtatggtaacgaagttgctacaccggctgaggcacgtgagatgcttggtttaacagctaaataataggaggcttctttatgacctggggagctttatacatgtattatcattgtccaaaatgcggaatgaaattcgaatacgcactggatgtcatgactgagtttggtgatgagttcggtttctgtccggaatgccatgtgatgggtgtctatgaaaaagaaggtgcccgtcagaaggatgacaatgattactttgaagtagagtaatagaaaagacacgatcagaatcagaaatggttttgaccgtgtctttttttctatatataaatgaatggctagtcattgacaggagaatttaagaaactatattacaaagattttatgtggaaagtttttctttttatacgataaagtgtttgcattgcttctggatgtgtggcataatattctatgtatttgacattgtgcaaaatgtgaaatgtgtaggaaggctataagtaaaacaggagtaaaaagaaaagaatggcagtaattaagagagtatcccttgtggatcaggtatatgacaaattgcgggagcgcattgtacagttaaagattccttttggaagtaaattaaatgtaagcaaacttcaggaggaatatggtgtaagttccacaccggtgcgtgaagcgctgaatcgtttattaaatgaagggctgattgaattcgaaaacaacgtaggtgcacacgttatagatatcacagagaaagatgtccgggagattcaggagatttctttttcttatcagatggtagccgcacgtaatgcacttcgtaacggcgatgcacagcagatggcagaggagatcgaaaaatacattgaagaataccgttcttccaatggcgtcattgaaagctgcagatgtatccgaaatattatggatgtattttataaaaattccaacaatgatatgttgatgacaaaagtaacttctatgacaggtatggacgagattctgcatgcattatttgcaatgccgcgtgaaaaaggtggcagtggcggacagtaccattccggtatcacatattttgagcagattcatgatgcggttgcaaacaaagattttgcaaaaatctgtgatggattggaagcacatcagttgtggtcacgggggtacattcttaaaaaccttgagactgtgaaaaatagattctaatatagagtatgagagcgggattcttaatttgtcccggcagctaacaatcgctgctaggaaaaattaagattcccgctatttcagttgttgtcctgaatttacatggcaaaaatataattcatgacaaatatctttttctaatagaaattttattacattttttgataaacagcgaagaatgtataaactaaaaaatataggaatattaccgtgattttttatcaccgtgtagattaagagaagtccctgatttttctcaaggagcgattgttagcgactgagacaaatcagggacttctctttcaataatgtatataaaaacaaaaaaatcgtgcacgatgcaaaatataaagtataaattgcaaattttcctgttgcgatacaaaaagaatcatgctataatgagaaccaatgaatgagaaaagagtctcaggaaagactcaaaaaatatataaacaaaagcaggaggattttagtatggcagttattaaaaactttgatgagatcgtagagcgtgtaaaaggtttcccagagccaatgcgtgtaatcgttgcagctgctcaggatgagcacacattacaggcaatcaaacatgcacaggaagaaggaatcgcaaaaccggttctggttggcgataaagcagagatcgacaaaatctgtgcagagatcggtctggttgtaccggaagaagatatttacgatgttccggatgtagacgagtctgcaaaacgtgccgttgccctgatccacgaaggaaaaggtgatttcctgatgaaaggtaaaatggagacagcacagatcttaaaaccggctgtaaacaaagagacaggtcttggaacaggccgtgtaatgtctcatttcgtatttgacgaacttccacattatcataaacttcttgttactacagatggtggtatgatgacatacccgacacttgagcagaaagctcagattatcgagaataccgtagagactctgaaagctcttggatatgagaatccgaagatcgcagctgtagcagcagtagagaaagtaaacccgaaaatgcctgagacagtagaagcacgcgagttaaaagagatgaacgagcgcggcgagatcaaagactgtgttgttgagggaccgatctccctggatatcgctctggataaagagtgcgcagacatcaaaggttttgaaagcccggttgcaggtgatgcagatgttatccttgttccaaacatccaggttggaaatatccttggaaaatccatcacaatcattgcaaaaggtaacatggcaggtttcgtagttggtgctcaggtaccgatcgtattctgctccagaggatcttctgcaaaagaaaaattcctttctcttgcattagcagcagcagtaagtgcaggcaaaaacaaataaggagaccgatatggaaaaaatcttagtaatgaatccgggctccacatccacaaaaattgcggtttatcaggatgagacaccgttatttgtagagagcattgaacattctcaggatgagttaaaaccttttgaaaatattatcgatcagtatgagatgcgtaaagacctgatccttgcaaccatggagaaaaatggagtacacaaagaggatctgacagcaatcgtatcccgtggaggactgcttccaccgattaaagctggtgcttatcgtgtaaacgaagatatggtatggcagcttacatacgcaccgcagaatgagcatgcatccaaccttggcgcagttatcgcaaatgccatcgctacagagcttgacattccggcctatatttacgatgcagtaactgttgatgagctggagccacttgcaaaagtgaccggtttaccggagatgcagcgtaaaggtatgggacataacctgaacatgcgtgcagcagctatgaaatatgcaaaagagcataacaaaccatacagtgatatttctgtgatcgttgctcatctgggcggtggaatcacattatccctgcaccacaaaggtcagattgttgatatgatctctgatgatgaaggcccgttctcaccggagcgtgccggcggactgcctgcatttcaggtcattgatatggcaacccgtgaaggcatgggcaaaaaagccatgatgaaaaaagtaaaaacacagggtggtcttatgggctactttggtgtaaatgatacacgaatcgttgaaaaaatgatgatggatggcgatgagaaagccaaactgatctatgatgcaatgattctcaatgttgcaagaaatattgcaaaattgagtgtttatgtggatggaaaagttgacaacatcattctgaccggcggtattgcatattctgaatattttacaaaagaagttgcaaaacgtgtagagtttatcgcaccggtaatcgtatatgccggtgaaaatgagatggaatcccttgctttaggcgctttacgtgtacagcgtggcgaggaagaggccagaacattcacaaaagttgttccggaataaaatcaaattatttgattttatgattttctaaattatacctatccaggaaaaggacttctgctttgcaggggtcctttttgttgaaaaaatggcacgctttttgtataataaaaaaagcaataattataattgaatgtatacgaattagaacatgtaaatgtgcagaaaggagttgaaaaaagacgctattttgtatacaatataaaaagtgagttagttaataaattaacaatagaggaggtacttatgtataagattttagaacgtaagcagttagctgataaaatctattatatggttgttgatgcaccaagagtagcaaaagcctgtcttccgggacagtttgtaatagtaaagatggatgagatcggagagcgtattccgctgacaatctgtgattatgacagagaagcaggaaccgttaccattgtattccagatcgttggagcttctacagaacgtatgtcagctttggaagagggagatgcattccaggattttgttggaccgctgggatgcccgtctgaactggtagaagaagacctggaagaactgaaaaagaaaaaaatcatgtttgtagcaggtggtgttggagctgcaccggtttacccacaggtaaaatggatgcatgagcatggcattgatgtagatgtagttgtcggtgcaaagaatcatgatatgctgatccttgaggatgagatgaaagcagtagcaggaaatctgtatgtatgtacagatgatggaagctatggtattccgggaatggttaccacagcaattgaagatctggcagcaaaagctgagcagccgtatgatgtctgcgtagccatcggaccgatgatcatgatgaaattcgtatgtctgcttaccaaaaagctgaacattccgaccatcgtttccatgaacccaatcatggtagacggaactggtatgtgtggtgcatgccgtctgcaggttggtgatgagatcaaatttgcatgtgtagacggaccggagtttgacggacatctggttgattttgaccaggcaatgaaacgtcagcagatgtataagacagaagagggacgcgcgatcctgaaactgcatgaaggtgatacacatcatggtggatgcggaaactgcggaggtgacaactaatggatatgtttaaaaaagttcctgtaagagagcaggatccaaaggtaagagcaacaaattttgaagaagtttgttatggatataataaagaagaagcggtacaggaagcacagagatgtatcggatgtaaaaatgcaaaatgtatcgaaggatgtccggtttccatcgacattcctggatttatcggaaaagtaaaaacaggcgagatcgaagaggcttacaaaatcctttctcagtatacatcccttccggctacttgtggacgtgtatgccctcaggagaaccagtgtgagggaagatgtgtccgcggtatcaaaggcgaggcagtttccatcggtaaactggagcgtttcgtagcagatgcagctgctgaaaataattatagccagcaggcaccggctccgtcaaacggacataagatcgcaatcgtaggttccggtcctgcaggtctggcttgcgcaggcgagcttgcaagaatgggatgcgatgttacaatttttgaagcattacatgagccgggcggagtacttcgttacggtattccggagttccgtcttccgaaacagcgtatcgttgcaagagagatcaacaatgtaacagatcttggtgttaaaattgagacaaacgttgttatcggtaaagcggtaactgttgatcagctgatcgatgaggaaggtttcgaagctgtatttatcggctctggagcaggtcttccgaaattcatgggtattgatggtgagaacgcaaatggtgtattctctgcaaacgagtacctgacaagaaataacctgatgagcgcatacagagatgagtatgacacaccgattcacggtggaaagaaagtagctgtcgttggtggtggtaacgtagcaatggatgctgcaagaactgcacttcgtcttggtgcggaagttcatattgtatacagaagaagtgaagcagagcttcctgcccgtgtggaagaagttcatcacgcaaaagaagagggcattatctttgaccttctgactaatccggttaagatctatgaagatgagaacggatgggtatccggtcttgagtgtgtccgcatggagcttggtgagccggatgagtcgggaagaagacgtccgcaggaaattccgggatctaactttgttctggatgttgatactgttatcatgtctctgggaacatctccaaacccattgatttcttctacaacaaagggtctggaagtaaataaatggaaatgtatcgtagctgatgaagagaacggaaagacaaccaaagagggtgtctatgccggtggtgatgcagttacaggtgctgctaccgttatccttgcaatgggagctggtaaacatgcagcacatgcaatctatgattatgtaacaaacaaataagggtttgttgcagaacaatttattctggcagttacacaggttgaatacaaccttgtttgtagctatatataatatcctatcctaataacaaaaaaagctgcataagcagctttttttgtttactatttttgctccactggaggatgctttttcatatacgtatccatgatatcttgtaattggtcacgatatttgacttctgtgtgaactgcaaaggcatctggatcaatgggaagattcaattcatttaagcgtctgatactccaaatgtaaagaatgtctaatgccgggatcaaatcttctcccagaggagtcagaatatattcgactttcaatgggatggtgttgtactgtattctttcaaccagtccgtcatgtgtcagttcttttaactgctgactgagcactttttcgctgacgccgagtgtcttttttgtttcgttgaaacggatttttccataatgatggatgtgatgcaaaagcgtcatcttccatttaccggagatacagtttgtgacaaaatgatacggattaacagtttgttgcatggaaagtatttcacctccgaccttttcttttgatttttctaaaagtaatttggtttaaaaaagtaatttagtatcaaaagggtaaccatagtgtagcagtttcgtgacaaaatttcaatggattctggtaaaaaatattcaaaatatgatataattagtcaaataagtgaaaaatttagaaaaatgggtaaaaaaagagcaaagcggaggtagaaaaatgaagacggtagaagaaagagtagcagagttaaaagacagacatgcacgcggatataactgtgcacaggtggtattgtgctcttatgcagatgtgcttagtattgatgaggagacactgtttcagatctcagaaggatttggtgcaggtatgggtggtatgatggaaacctgtggtgcggtgaccgcaatgtttatggcacttggattgaaaaacagttccggggatctgcgggcatgcgatactaagccacagaccatgcgtttggtgcgggagctggcagcaaaattcaaggataaaaatggttcgatcgtatgtcgggaactgaaaggtgtggatactggaaaagtgctgcgaagctgtgatggctgtatcgaggatggtattcggattcttggagaatatttattagacgaataaaggattgtgtgattagacggacgaaaaaagagagaaaaaagtatcctgcagactaagacgccttgccggatattttttgaatatttggttgggcggttttattggtattttaatgtcatatattgatcgggtgtcgcatattcataagcagaagaggagagtgacggatatgacaaataaaaatatttatcagaatatcgcagcaagaaccggtggtgatatttatcttggggttgtgggaccggtcagaaccggaaaatctacgtttatcaagcgttttatggatctgatggtgctgccccgcatggaggagtcggcaggcaaacagcggatgattgatgaattgccgcagtctgcacagggaaaaacgatcatgacaacggagccgaagtttattccgcgggaagcggcaacgattcaactggatgaggatgtgtcggcagatgtgaagctgattgactgtgtggggtatctgattgagggtgtcagcgggcatatggaggatggtgcggagcggatggtaaagacaccatggtacggctatgagattccatttgcaaaagcggcacagatcgggacggagaaggtcattcgggagcatgcaacgattggaattgtagtgacaacggatggcagttttacggatattccacgggagaattatgtcccggcagaggaaaaaacggtggaagaattaaaaaagattggaaagccgtttgtaattttactgaatacaccgaggccgcacagtaccggggcagaacagctttgtcaggagttgcaggagaaatatggtgtcactgtgctggcggtgaactgtgaacaattgaaatcggaagatattcggcagattttgcagagtgtgctgtatgaatttccactggaggcgttagaattttatgtcccaaaatgggtagaaatgctcccgacagcgcataaagtgaaacaggcagcgatacaggaagcggggaaaattttgcaacaggcagatcagatgaaggatattgtcgggcatacttttttgccggaacatgaggaaattgcagaaattcgtctggatgtgacggaccttgccagcggaacggtaaaaatttgtctgggagtggatgaacgatattattatgaaaatatcagtgaattgacagggattccgattcacggtgaatatgaactgttatccctgatccgggaacttgccaaacagaaaaaagcgtacgaacaggtggcttctgcaatcgaaagtgtccgtgacacgggatatggcgtggtatctccgtccatggatgacatcagtattgaggaaccaacgctaatcaaacatggtaatcgctatggggtgcgtgtgaaagcatcttccccgtccatacatatgatccgtgcaaatattgagaccgagattgcgccgatcatcggaagcgaagaacaggcaaacgatctggttacttacatcaaagacaatcagaatacgtcagaaggtctctggaaaaccaatattttcggaaaatccatcggagaactggtggaagatggaattcggcgaaaaatcacgatgatggatgaagaaagccagcaaaaattgcaggataccatgaaaaaaattgtcaacgataataatggtggtcttgtatgtatcatattgtaaaaacgtaagaaagtccgacagaagtatcacacaaggcgtcttagcctgtgggatacttctgccgggctttcgtattatatatcaaaaaggggaacatcttcacggacttgttcatttttgggttttgtggtattataatttactatctatgtgaaaagtgtaacgatttcaagtaaaacagataaaaaggagaagtttggcatgagtgaagtatatgacaaattactgagatgttatcacagtgtgagagaaaaagtatcctttgaaccgcagattgcattgattcttggttccggtctgggggattatgcggagcacattcaggtagaagcggttctggattatcatgaaatcgaaggttttccggtttctacggtactgggacacaaaggacgtttcgtgtttggttatattcaggacgtccctgtggtaattatgcagggcagagtacattattatgaaggctattcgatgagtgatgtcgtgcttcctaccagactgatgggactgcttggagcaaaggttttattcctgacaaatgcttccggtggaattcaggatgggatgcaggttggcgattttatgctgatcaccggacatatttccagctttgtgccgtctcctctgatcggaccaaatccggatgagcttggcacccgttttccggatatgagtgaggtttataaaaaggatctgcaggaagtgattcgaactactgcaaaagagttacagattccgttgaaagagggcgtgtatgtgcagacaaccggaccgaattatgaatctccggaagaaatacagatgtttaagattcttggcgcagatgcggttggcatgagtactgcctgtgaagcaatggcggcgaatcatatgggcatgcgcgtttgtggtatttcctgtatttcgaatctggcagcaggtatttctaaacatcctctgacgcacgcggagattcaggagatggcagaccgggtggcgccaatgtttaaacagctgattacagaatctgtagtaaatattgcaaagacggtaaatgatgcttgttagaaaaatggatctgtgtgactgaataaaaataaagaatgtgaaatacagaagacaaaaatacaatagaaatcaatgatttgtataaatatgttttattatatagaaacaatatgagaaaggaa

SEQ ID NO: 13342 - DNA, 2354 bp, Unknown
  gut microbiota DNA sequence
ttataatgcaaaaatcctgacgttaaatgagcaggaacagtttgaaattattcgtggagaactctgggtaaatggagattccatccgttatgtgggagagagaaaaaaaccggcggaaatctgtgccgaattgaaactggagatgccagtatgggagcgtgagatcgatgtaaaaggcaatctgctgatgcctggatttaaaaacgcccatgcgcatacctatatgacatttttacgttcctatgcggacgatttgccgctgcaggagtggttatatcagatgtgctttccgaaggaggacaagctggataccgaaaatatccgtccattggaagtacttggtatcatggagtatctgaccagtggtatcaccacaagttttgatatgtgttatttcccaccggtgtatgcacaggtggcagcacagtgtgggttccgtgcagtacaggtatccggtgtcaacagttttggcggaagcgcagcagtggttgaggagaattacctgaaagtcaatgagaccagtgatctgacatctttcatgatcggtttccatgcggaatacaccacaaaaatggatctgatgaaagaaatcgcagatctggcgcacaaatacaaatctccggtattcctgcacaattctgagacacagaacgaggtgaaagagtgtctggaacgttatggtaagacaccgacacagctgacagaagaacttggcatgtatgagtatggtggcggcggatatcactgtgtatattttgatgataaagattttgaaatctttaagaaacgccagcttaccgcagttacctgtccggcttccaatctgaaactggcaagtggaatcgcaccactgaaacggtttgtagaggaaggtattccggtggcgatcggtacagacggaccggcaagtaacaacagtctggatatgtttaaggaaatgtttctggcaagcgcacttgcaaaggtgcgtgaaatggatgcggagtgcatcagcgcggacaagattttatatatggcaaccacaggcggcgcccatgctatgggattggacaactgtgaccgtctggccgcaggcaagaaagcggatctgattatgatcgatctgcagcagccaaacatgcagccagagaataacatcgtgaaaaatcttgtatacagcggaagcaaacagaacgtgaagctgaccatggtaaacggaaaaatcctgtatgaagatcagaaattctctatcggatttgagccggctgatatttataaagaagcaaaccgcattattcgttctatggaaggataaaatttatgaaagtaacattatataccgatggtgctgcccggggaaacccggacggaccgggcggatacggagccgttttacagtttattgattccacaggcaaactgcatgaacgcgaattaagtgccggataccgcaagacaacaaataaccgcatggagctgatggcagcaatcgtgggactggaagctctggtaaaaccgtgtcaggtggaactgtattctgattctaagtatctgacggatgccttcaatcagcactggatcgatggatggctgaaacgcggctggaagaaatcagacaaatctccggtaaaaaacaaagatctgtggagcagacttctggcggcgatggaaccgcatcaggtaacgtttcactgggtgaaagggcatgacggacatccggagaatgaacgttgtgaccgtcttgcgacaacagcggcagacggtggtgatctgttggaggatgagataacagaatgagaaaacaaatgagtaacagcggtctgtttttgtgctttacggcactgacaggtgctgtgatcgccggtctggtatggctgtatctgaaaattgcaaatgtagggattacagtcatctgggaaatgattccggcatacatagattcctggtattatacgattctgatgtgtctggctggcggagtggtgattggactgtttcacaggatatacggaccgtatccggagcagatggcagattctgtgaaacgtgtcaaggacactggaacttatccgtatcgaaaactgccgatgatcgtggcagcgtcctttctgtcgttatttttcggcggggcggtaggaccggaatccggtctggttagtctcctgcttggactttgctgctgggcgatggatcagttcggactggcgcgctggaagatgaacacgctgcttgccggaaacccttatattatgaataaagaactgtttcgggtgatggcggcaggactatttttgccaccggatcagattgtatacgacaaaggaaaaattgaatggaagcggaaagagcaggtcgcagcaggtgtgacggcaggt

SEQ ID NO: 13343 - DNA, 1644 bp, Unknown
  gut microbiota DNA sequence
tagatgcggcagatgaggaaaaaccggatctgaacgatcagctggcagctcagacagagacagaaggtgcggtttgcaagatcattgcagttacatcctgcccgaccggtatcgcgcatacttacatggcagctgaaggtctggaaaaagcggcaaaagcccataactgctctattaaagtagaaacaagaggatccggcggtgccaaaaatgtagtgacagatgcggaaatcgcaaatgcagactgtgttatcgtagcagcagatgcaaaagttccaatggatcgttttaacggtaagaaactgattgaagttcctgtttctgacggaatcagtaaagcagaccaactggtggaaagagccatccatggtgatgcaccggtttaccacagcagttcagcagaaagccagagctccagctcacagaaagcttccggtggaatcggacataaattatatgtacatctgatgaatggtgtatcccacatgcttccattcgttgtcggtggtggtatcctgatcgcaattgcattcctgattgatggaatgaatgtcgatatcaattcactttccgcagatatgagagcaaacttcggtacaatcactccggtggcagcagcgttcaaacagatcggtggaattgcctttggactgatgcttccggttctggcaggatttatcgccatgagtatcggtgacagacctgcacttgctgttggttttgtcggtggtatgatggcagcaaacggaaaatccggtttcctgggtgcacttgcagcaggtttcctggcaggtctgatcatcttattactgaaaaaagtatttgctaaattaccggatgcattggagaaaatcacgccggtattgctttaccccgtatgtggtattctgctgatgggaatcattatgatgtttgtcatcgagccgccggtaggagcgttgaatacagcattaaatacagccttgaccaacatgggtgcttcgagtaaaatattactgggaatcgtttgtgccggtatgatggctatcgatatgggtggtccattcaacaaggcagcttacgtattcggtaccgcagcaatcgttgccggaaactatgacattatggcagccgttatgatcggtggtatggtaccgccgtgtgcgatcgctcttgcaactttgctctttaagaacaaatttacaaaagaggagcgcaaatccggacctgtaaactttgttatgggacttgcattcatcacagagggtgcaattccgtacgcagcagcagatccgatccgtgttctgccatcctgcgtagctggttcagcagtagcaggcgcattatccatggcatttggatgtacactgatggcaccgcatggtggaatcttcgttgtaccggttatgggcaatgcaggaatgtatctggtagcacttgcagtcggaaccgtaatttccgctgttttactcggtcttttgaagaaaaaagtaaatgaataattgagaaaaaaggagaactaaccatgaaagaatttaagtatgtaatcacagatgcacagggaattcacgcacgtccggcttctgatctggtaaaagaacttaaaggagttacttccgttgttaaacttacaaaagaaggtaaaacggttgaggccaaaaaatt

SEQ ID NO: 13344 - DNA, 1763 bp, Unknown
  gut microbiota DNA sequence
tttaaaacaaaagactctgaatatggaatatacgaaaaaatacttttttctttcttccatattcagagtctttttccaaatatcatttattcgtactcagcatacaaattcccgtctgaacattcagatagaactcacccgccatttgcgttcaagaatgcctctgcattcttgttgcgagatgtgcgtcatgcaattgcatgacgtacttcaactgcgtacctctgcaagtctacactccgtttcggtcggcgcaaaaccattgtccaccggacaatgtgcgcctgccggaggctatatcatatgatgtccttcattctatcgaaaaaatgattacctctgcaatcgtaaccactgctataatcaccatgagccagacagcaaaacctaatagatgccagcctgtttttttattcttcagcaatggtaagacatcctgtatgtttccgacatcaacccatagcagcataaaggtgccacaaatgataataatcccaatccatagtacggatggcactcctactatccggaaaacaatttctgcattcacccaaatcccaagcacgtataaaaaacctagcagaactgcttctaacaccatttgatctgaccgcgataccagattctgaatcttgcccctcagtcccccgccataatcttcatcttcataataccattcatcctctatatccaaatcatctttctcattcaattccggcgttttatctgtaatcctccgcacacaggtatcctgatcgaaatccacaaaacaaaagccgttattcttgtttttgaacaattcaaaaaccgcattcgctgtctcatcattctcaaacatgaaatatcgatactgtccacgatcgtttttttctgctctgacaatacatacatcatctcctgattccatttccatccgttcttcactttcttcatcttccggaatcagaatcaggtatcgattttgatcgtattctacccaatccagaatagcacaacgtacctccatactatacgtgccatcttctttttccaatttcagtgcagaacataccggtctccagtcatcttcgagcaagtcatcctctgatttttctatatctgcaagattatttatgagctcctccagatgaaattcttctctcatccatttcagaatttcatcttctttttcataacactgctcaatcccttttgcttccaataatttccggataaatgctttctcagagtcatagccggatttgtagactgcctgcagacgccccatccgcattcgcattgcccctggcagttgcgtttcctctaaatataccagtgtctgagatttgcccagatccctcgcatatttaatttcatccttacaattcaatgaatttatgtaatttgcggaaatcattgccagaaaaaattcacatttttcaatatgttctgctatattttcatcccattctgttcccggatcaataccctcatcgtaccatacacgatatcgctttccctgcaacagtcgtatgatcttaatcacttccggccgatctatatgtgaataactgataaaaatatacggttgatctccctcatacggatcttctaaaatacctgctttccgcatctttcctaactctccctgataataataaattcaagtcgaacgcacgtgagacttggtgcgtgcttctggtcagcgcaaactgacatcttcttttcagaatcactgcactctacactccgttccggtcggcgcaaaaccattgtctcccaga

SEQ ID NO: 13345 - DNA, 648 bp, Unknown
  gut microbiota DNA sequence
tattctattggaggaggacgtatccgggtcagtattttggatggaattgaagtagatttcagcggggagagtaatacattgattgtccggaatatggaccgtccggggtgtattacggaagttagtgcagcacttagcaaagagaaaatcaatgtagcaaccatgcaggtgtttcgacataaaagaggcggtggtgcagtgatggttgtagagacagatgaacggataccgattagtgtgacagaagaactgcggaagaaggaagacattctggaagttatttcgctgaatttggaagggaggaatggataatggcgtatcaggcagtagaagaaatacaggtcagatgtgagaaggagaacattcctttctggaaagcagttcagttagaagactgcgaggaaaatgggattacggaagaggaatcctggcagcagatgacactcatgtggacgcggatgaaagaaagcgttgacgcctatgatccttccgagaaatccagaagtggtttggtcggaaaagaaggcggtcttatggatgaatatctccagaatgaaaagccgctttgtggagattttgtttcaaaggtcattgcaaatgcgttgaaaatgggctgtaataatgcctgcatgaagcggatcgtggcag

SEQ ID NO: 13346 - DNA, 1962 bp, Unknown
  gut microbiota DNA sequence
agtgggagtcttctcgactgagataaaatgagagagtcgaaagcgacagaaataccgattgtggtgtttgtggattacgttttcggctctttttttgatggaaaatctggtataaaatttcacaaaaataatatattacaacaagagaaatcgggtggtgtttcgtttggaacgaacatatggaatcggcattattctgggggtatgcggactgatcctgctcattggaattttgaagaaaaatgcagagattttgctgaattttgtggctcggacggtggtgtgtctgatctgtatgtacttcttaaattccttctttacatccaggggatttgatgtggcgatcggtatcaatccgttgagtcttttgacatgcggaacccttggaatcagcgggcttgcggcactttatgggatcttgttccttcagttgttgtgataatgcacaagtcgaaaaaatgacagaaaaatggctatagacaggtgcagggaaaggacttataatcggtttcacaaaggaggtggagcacatgtggaactaattcgaatcagtgcatcggcagtaatacttcttcttgctgtgaggtcagatttttcggatggtatcattcgaaacagactgattgcggtgggaatcctgatcggaattttgtgttggattccgggatttgaaccaaagattgcaggagaagtgatcggggggcttttattaccgatactgatttgctggatcccatttcgtatgcatggactgggagccggtgatatcaaactgttctgtgtgatcggctgtctgaatggcagtcggaatgtaatctattgtatctgtatttctttcctgctggcagcaggattctcattcggcagattgctgaatcagagacagctttggacaagcatacaaagctgtgtcagctattttcaaatagtagtacaaaagggaaggatcattccttatcctgaacggacaagaaagggcgcccggtttcatttttcggcggctattttgttcgggtatgctgtaattctgggggtgagtgtatgcaaaaccctgttgtggtgatcgggggactggaaaaatcttatatgcaaaaactggcgctgtatctgaatacacggatcggaaaagatggttatgtggagttgttggaaggttcggacaggcagatggacttgctgggaagttcgggcaaacagatggaattgctggaaagttcgggcaggcagatagattctgtgcgggaagatatgagacttcaaaatgtgaggcaccaaagagaaaaacactgggaactggcagtaggttcggaagcgtttgtggtggctttgcaggaagcgggacaggcagaacagattctgatccttactgatacggaggaagaagatgagatgcatatcagtcagtaccaagccagatcggtactgtttcagaagatcattgcgcggtatcaatccattgccagtgtagggatgcagatggcggcggtaaagaagcagcactggattgtctgtaccggtggaaaccggggaagtttgatggcagtttccgcgctgtgtgcctggattcttgccaggagacaacgggtgttgtatgtggaattttcggaaaacagtggtctggtatcggtatttcaactggagtatggaaccgcagatatgagtgatctttttttacaactgagaaagaatatggggacgtctttggagctgtttaccgggcagctggatgggatggattacatccgtccaccggaaaatgccatgattttgtatgaaatcagggaagaggatctgcaggcttttttgaggcagctttccgcagaggggcggtatgatgcggtcgtattttccgtgggaagcatgatctgtggatgtcagcttattttttcacaggcagagcgaatcttgcagatttcgggaggagatttgtgcagtcgttgtgctgccggggaagaagttgct

SEQ ID NO: 13347 - DNA, 2061 bp, Unknown
  gut microbiota DNA sequence
gaatatccaaaaatctgtccgtgcgtgattgttggagtgatgcacaaagggaaaattctggtcagctggtacaaaaatggtttccgtgatcattatgcgctgattgccggttttgcggaggtaggtgagaccatcgaagaaaccgttgcaagagaagtgtatgaggagacacatttgcatgtgaaaaatctgcgttattacaaaagtcagccatggccttattcagaaagtcttttatttggatttttctgtgaactggatggagaagatcatatcatcattcaggaggacgaacttgccatggcaaaatgggtgacaccggaggaaatttttgagtcatcggataatttttccctgacaaatgagatgatctgtaaatttaaagaggatatgacggagcacaaacagctttgtttttagagtaggagtatagaaaacaatatgataaaacaggaaaatctggcaattgtaacattgaaaaaaggagaaggacgtaccatcaaagcgggaggcgcatgggtattcaataatgaaattgagaccattaccggacgttttcataacggagatatcgtgctggtgcatgattttgacggttatccgatgggaaaaggctacatcaatcagaattcaaaaatccgtgtgcgtcttctgacgagacatgtggatcaggagattgatgaggcatttttcgagatgcgtctgcagaatgcatggaattaccgaaaagatacagtggacacttcatcctgtcgtctggtgtttggtgaggcagatttcctgccgggaatcgtaatcgataaatatgaagatgtgctggtaatggagtgcctgactcttggtatggagcggtataaagaacttctggcagatctgatgaaacagattcttgcaaaggacggcattcagattcgtggtgtttatgagcgaagcgatgcgaaagagcgggaaaaagaaggattaagccgtgtaaaaggttttattggagaagaatttgataccaatgtggaaatcgtagaaaacggtgtgcgttacatggtggatgtggtgaatggtcagaaaactggatttttcttagaccagaaatacaaccgtctggcaattcagaaattgtgtaaaggaaaacgtgtgctggattgctttacacacatgggaacctttgcactgaatgcaggaatagcaggagcaagcgaagtaaccggattggatatttctgaatttgcggtagaacaggcaacagaaaatgcaaaacgcaatggattgagtgacacagtaaaattccgtgcggcgaacgtactagatgaacttccgaaactggcagcagccggagaaaaatacgacgtggtaattttggatccgccggcatttaccaaatcccgtcaggcaacaaaaaatgccatcaaaggttaccgtgagatcaatatgaaaggtctgaaactggtcaaagatggcggttatctggcaacctgttcctgttctcatttcatgacacaggagcttctggcaaagaccatccgtgaggcagcacgttccactcataagagactgcgtcaggtggaatttcggacacagtctgcggatcatccgattttatgggcagcagatgagtcctattacttaaagttcttcatttttcaggttgtggatgaaaaataggaagataaaaaagttcgcaaagccttgtattttaaaaggacactgaaaaagtctaattcttcgaaaaaagaattagactttttcagtgccctttcaatatagtggttcagtgtgttgtggtcaagtttttttgtttgattttttcatcactggttactttccttttccgtatacaaagaagtgattttgtatctgcgttttagaaagattttatggttttttcatggaaaagacaagggtatatgttacaattattacaaatatggggatttcgaaggtaaggagaattattcaaaaatggatgagaaagtgaaagtaacagatacagaacaaacagataaaaaagtaaatgaagatacaactctaaaagaaaaattggttgaggcagagtacatggaagcagat

SEQ ID NO: 13348 - DNA, 6790 bp, Unknown
  gut microbiota DNA sequence
caagttacctgccattagcagcagatcagctggatctggcgaaacaatacaaacagatgatgctgttttatgaggccggaatccgtcagctgacgacaaaattacagattttgaaccgggaatttgaacagagcaatgaccgtaatccgattgaaaatataaaaagccgtattaagtcagcagaaagtattgcaaagaagatgaaacggaaaggcttaccgatgacgttaagctgtctgacgaacaatatttatgatattgccggaatccgtgtgatctgtccgtttattacggatgtatatgaggtggcgcggatgttgctgagtcagaccgatgtggaactggtacaggtaaaggactatattcgggagccgaaggaaaacggttaccgcagtctgcacctgatcgtcaagattaatgtgttcttttccgatgggatgcggcaggtaccggtggaagtacagatgcgaaccattgcgatgaatttctgggcaagtacggagcatcagcttcgttataaaaaggacaaagtcattacatcggaaatgcatgcacgtttgaaaaaatgtgccgatattatggcagatgcagattatcagatgcagaaactggcggaggaaattcatttttaggaaaaattttcataagaaaacaatacgaggatgaatgtatacagatagaaacttgcagaagaaatctatttctgatatgatgtgcgtcggtatatgaaaagtatttataagtgcagtaagtaaaagaacagcagttaaagaaaaaactactgcatatttactgtaaactgggagaatttgagatagatttatgagtgaaaaaaacaaaggaaaaaaattgtcaggcggaaatcatactgtgcaaaagcgtggcaatgacaataagaaaaaagaaggtacagcctgcaaggttgcaaaaaaatgtggtggatgccagtatcagggcgttccctacgaaaagcagttaagtgagaaacagaaagcagtccgtcagttaatgcagccgttttgtaagactgcggagattacaggaatgcaagatccgtatcattatagaaataaagtgcatgccgtgtttgcacggaaaaaagatggtacgatcatttccggcgtttacgaggagggcacacatcgggtcgttccggtggaagcctgtcagattgaggataaaaaagcagatgccattatcaatgacatccgtggacttttaaaatcttttaagataaaaacctataatgaagataccggttacggtttgctgcgtcatgtgctgatccgccgcggatttaccacaggtgagatcatggtcgttctggtgcttggctctccggtgatgccgtccaaaaataattttgtcaaggcattgcggaaactgcatccggaaattacaacggttgtgctgaatgtgaatgacaaacgtacgagcatggtgcttggtgaccgtgagacaacgatttacggaaaaggctatattgaggacgtgttgtgtggactgaccttccgtatttcttccaagtctttttatcagatcaatccggttcagacggagaaactgtatggaaaagcaatggagcttgccggactgacaggtaaagaacgtgtcattgatgcgtattgcggtattggaaccattggtatggtcgctgcaaaatctgcaaaagaagtgatcggtgtagaactgaatccggatgcagtgcgagatgccatcaaaaatgcaaaacgtaaccagatgaaaaatatccgtttttatcaggatgatgccggacggtttatggagaaaatggcggcaaagggcgaaaaggcagatgtcgtgtttatggacccgccaagaagcggcagtacggagcagtttatgaaatcagctgtaacgctggcaccgcagaaaattgtgtatatttcctgtgatccgcagacgcaggcgcgggatctgaaatatttgacaaaacatggttataaagcaatgggggcgtatccgtatgatatgtttccgtttacaaagcatgcagaaaatatcgtgttgttagtgaaacagaattaaatttgagtaaaagagatatccggaagaacagatgatgcgtgtattttgcagtaaggattgcgagattatttacagattgtagcaaagaaaaacctgtaatatatgcatgttatgagataaaaatgggagatttgagtcttagcaaaagagaattatatgattaacaggaaaaaaagaattctgttttacatattgatggcagctgttttatgctggtttgtcgtgttgcagatttttggaacaaatgagcgggataaaaagacgattgagcaaaatattctttatcagggcacgtttgtctgggaaaaatcagacggaagccgggagcagatcgaagttccgggcagatatgaactgtcggcgaaggagacgatggttctggtaacgcaattgccagaagattatgacgaaaaagcattggcgatccgttcttcactgcaggaagtccgattttacgttgatggcgtattgcgggctgaatatgacacgtcagatacgagattagcaggcaagaattctgccagtcgttatgtgttctgcccgaccacggaagctgacgtaggaaaagaagtccggattgagttaaagacaaatacagcaaaatattccggtgtggtaaatgaggtttactgtggagataaggcagaaatatgggaatatatttttgctgaacacggactggagacggtgatcgcgtttttcatcctgtttgcaggcattgttactgtcattttcagtattgcgctgggggtggtatatcgtacgaagtttgatatggaatatcttggctggtgtatgatcatggcagcaggctggatggttggagaatcaaaacttcgtcaggttctggtaccaaatgcaacggtgttagcaacgctgtgttttgttatgatcatgcttggaccgttgccgattatttattacatagacagtatgcaaagtggtcgtcaccagaaactgttctggattgcagaggcggctgccatagttaattttgcagtatgtacgattttgcatctgagcggtgcgaaggattatatagagacacttccgattgcacatgtgattctggcagttacgttagtattgattcttggtacagtattttatgatatgtaccacggctatattacacaaaacagatttatggtggtgggcttgctgattgcggtcgtttcggttgtggtggaatccatatctgcgtattttgtaatttctatttccggtatttttatgggaatcggtatgatcgtgatgctgtttttcagtttggtcagaacaatccgaaatttacagaagatggaaagtcgccgacagcggcaggaaatgagaaagcgcagaaagcagatggaaaccatgtctctgcaaatgatgcagaccttgtctaccacgatcgaggcgaaggacgaatataccagagggcattctcaccgggtggctgagtatgcggttctgatcgcaaaggaacttggctggagtcaaaaggatatttcaaatttgcggaatgcggcacatctgcatgatattggtaaaattggtattccggatacgattttgaataagccaacgaagctgacagaagaagaatatgcggttatcaaagagcatactgtgatcggggcggaaattctgaaaaatatcagattgatcgatcatgtgacagaggtggcacgaagccatcatgaacggtatgatggcaccgggtatccggatggattaaaaggggaggaaatcccaatccatgcaaggatcattgcggtggcagatagttatgatgcgatgcagtcccgtagaatttatcgaaatccgctgggaacagcggttatttataatgagattttgaataaccgtggaacacagtttgatccggagattgcagatgtgtttttgaaacttctggatgaaaaccggctggtgattaatgcggattataaaggaatcgaggatgaatatgccctgccggcagtggagagtgaaattgaaaaatttatttccaatgttatgactaccatgcggacgcaggaggacagtgagggctttgacttcttaacgggtcttccaatgcggaatcgtggagaaaaactggcagcgcagtttatgcagcaggacgatggatatcttgttttcctggatatggataatctgaaaaaaatcaatgatatctatggacacaaagccggtgaccgagcactgaaattgcttggttcgctgttgttagaatttgcacagcattctgtggtctgccgtctgggtggggatgaatttctgatgtttgttccgaatgtttcgaaggaaaagatttcggaaattgtccgtagtattctgcaaaaatttgaggaacagaaagaggaagatatggagatccgccacgcgtcaatttctgctggaatctgtgaaacgacaaagggagcatcttttgaggagtgctacaccaaggcggataaggcattgtattatgtaaaacagaatggtaaaggtgatttcttcttctatcagcagatggagcaggagcagaagacggatcagggaaccggaagagatctggcaatgattacaaaagcattgcgggagagcggcaattataccggtgcactggatctggattaccgtgaatttgcgaaaatttatgaatatatgaatcatttaggtgagcgttacaaatatcactgctatctggtgatggttacgatggatacgacaccggattatgtgatgtatatcgaaaatattgagcgggcgcttgagagtatggaacaagcgattcggcagacaatccgaaaagtggatatttgtacccgctacagttccatgcagtatctgatcattttgtttgaggcagatgagacaaagattccaaaagttatggatcgaatctttacacagtattataaacagtacgataagagtaattttattccgaagtatgagtacattctgataatggaagaaaaagaggagcagtgatcataccactgccccttttttgtgtgttacgggaaaatcaaaatggaaaaatactgtgaaggtaaactgcaataccatcgtggtcgttgtcttttgtgagagcgaagcctttttcttttatgtcttccggggcatttcccatgaggatttcacgaccggcggtatgtaacatttccacatcgttgtaattatcaccgaatgccagagtgtgttctgttgcaatctgttttgtgattttcatccataatcagtgcgccgttacatccgatgatattgcaggagagatgaatccggtcgagaatcggctgaatgcagagcggatttcgggcggaaatcagggaaaattggatgccgtgttgtatcgctgaacggatgacttcctgtgtttttggggaaacatgatgttcggaggttaaaaaggttccgtcaatgtcactgaaaatggcttcacaggtaaatggggtgttcatctcaggctgagttgagactcccacttctgcaagtggtgagtagtaacaagtatttctcagtgggagttcaatctccgactgagataaatgctccgcgagggcgcacattgtctggaagacaatggttttgcgccgaccggaacggagtgtagagtgcagtgattctgaaaagaagatgtcagcttgcgctgaccagaatcacgcaccaagtctcacgtgcgttcgacttgaatctgggatttccaatttggtttgcaccggaaagtctgtggtgggtgatgccggtggtagaagtgctggtgctggcattgagtattttctgggtgagagaaaaggctacaccgaagaaaaaatcatgaaattgatgatagaatagatttttgggatgtagataataagaatgtgccagatgatttcacaaagaaatatggttgcaaaaagttgacttttttactatattataactattcgataagacgatgcaaaagatatgctactgaatgaagtgcagaaataggaagtagttttttttcgataaagtatagaaaacgattagtaaaagtagataaggttggtagaaaaatgcagatttcaagcagatttacgctggcgattcatatttttgcctgtgtggatacattcaaagatgattataaagtaaccagtgattttattgcaggaagtacaaatgtgaatcctgtcattattcggaaaatattaggtcagctcaaggcggcaggactcattgaggtggcgaggggaactggtggaaccacgattgcgaagccgttgtcagagattacatttctggatatttatcgtgcagtggagtgtgtagaagaaaatcaactctttcattttcatgaaaatccgaatactgcctgtccggttggaagaaatattcatcatgtattggatgaaaaactggatcgggtgcagaaagcgatggagcgggaattgcaatctattacgctggaagatgtcagagaagatttgaaaaaatatctggagcaggaaaataataaataaaatgataagtaaaaaacgggatttcacagttgtgagatcccgcttttttgtattaataacaatttttacatggtcttgattttccactttcagagatggaaccgctgagtatagttttggagcgtccaagactaggacagtccttggtggagtgataaacttctccatttggagtccagtataccgtttcaccggtgttttgctgtgaatcagaagtgtcggaagaataagtggtagtattttgttgtgtctgagcgagactgtaattaattctgtgt

SEQ ID NO: 13349 - DNA, 457 bp, Unknown
  gut microbiota DNA sequence
gatcaatatttcggcgagctttggctttgtttatagtatcaatcacgcaggatacttccagtgtttctgaaagtgtccaggctatgatttttctggaaaataaatccataatactggtcagatagacaaatccgtctattgtccagatgtaggtgatatccgaacaccagacagcattcggacggtcaggattaaactgttcatcaaggatattttgtaattctgtgctgaaatcagaatcttttgtggtgatggtccatggtttgctccactgagcacggattcccatttggcgcatatatgtaccaacggttctttccgaaatgacttcaccggtttttcgcagttctacagtgattttcggagcgccgtagttctgcttggaatcatcataaatatcctgtatttttgcttttacggcttcacgacgtttttctgtatcagaaggtacgtggtg

SEQ ID NO: 13350 - DNA, 1080 bp, Unknown
  gut microbiota DNA sequence
gagtgaatacaaatatattacgtttccattatagctgtggtcaaaatgtttgacaattactattttcacaaaatcctgtttagaaatgtcagaccaatcttaataaaatattttttatcctaacagcacatacgtgctataataaatacattctggcatatgaggtaccaaaagcaaatgtcaaaaacttattttgtggacagtgaaaacgtcggtgacgcctggattgaccttctgctggcagatccaaacggcacgttcctgattttttacaccagtcactcaccccgcattgattatgagcatgccatcgctctgatgaatgcaaaaaacaagccccagttcattcgatgccacgaaggcagtaatgcactggattttcaattagtatcttatcttggttatcagctccgctcaaaaaacaccgatgaaatggtcatcgtatcaaatgatacaggttttgatgctgtggtttatttctggtctgagcagaaccgggcaattacacgacttaccagcagtaatatcccaactcctgaaatcaagacagaaccaacacctgtatcggaggaaaaagcagctccttcttcctctgtagacacagacactgagcaaacgataggtggtgttgatctcagggaactttacacaatcattaattgtgtcggttccaaagaatcttcttatatccaccttgcctatgtgcatttttatggcataaaaaaaggggaagaactttataaatacatgcgtcaggaaaaatttgcagcgccttcggtttcctggaaaaaagaaacccgattcaagaaattctgtgaattgatcttcaagcattgtaacacaaccgataccgaagttcctgcagatttcattgcttatctgtacgcaacgctcacacagacagacgacaaaaagagtctcaatcgaaagctgcagaccaaatatccccgccagggaatgcaattgcacaaaatactcaaacctttttataaaacacttttgaaaataaagaaataaaaagaaagatgccagaatagggcatccccctgcggttatgcggacgctactgaaaaactgttt

SEQ ID NO: 13351 - DNA, 1651 bp, Unknown
  gut microbiota DNA sequence
tacctattgctcaaatatggcaaaatccggaatgaatccaaaagcattgcaatatttgatgggccactcagacatcagcgtaacgctgaatacatatacgcatgtaaatcttgaggatgccagggaagaagttgcccgaattcaggctgtgtaattacgatttttaattgaaaatagcaaggtgtaaaatagaaaaatatacacctcattttacaccttttgcggacgatattatgcgaaaataaaccaggttataccaaaaagcaaaaatttacaaaggctcacaaagcccgaaataccaagaaaaactaagaaatgcgaggttatgcaacaatgattaaagtgcttttcatctgccacggcaacatctgccgttctcccatggcagaatttgtaatgaaagacctagtaaaaaaagccggtcttgcagaccagtttgaaattgcctctgcggcaaccagcagagaagaaatcggcaacccggtacaccgtggaacccgcaataaattaaaacaatacggcatttctgtagatgggaaatatgcggttcagatgaccagtgcggactatcgttattacgattacatcattgccatggaacgatacaatttacgcaatatggaacgatttgtccatggtgatccggatcacaaagtacatcttttactggattttacagatcgcaagggtgatattgcagatccgtggtatacaggaaattttgatgaaacatatgatgatgttttagaaggatgtcagggattgttgtcagagacaattgcatactatgatcataaatgttaaaatataataagcgcagacgagtcaacatactggtatgattgacaacatcgaattggatcatgtgctgaatttgcacatgatataacaataaactgtaaacgcatgtgaaagaggataatcatgaaaaaaagactgcataagaaaaaatatttttatattaaaatggcggcagttctgattcttctgatcacatgcgttctttttaagtacacgacctttgtacagaagaatgcgatccaacagtgtttcagcattttgaatgattccagagaacagattgggcagatgatcacaaatgagatgaaaaatgagcaggagcatctggagtcggcatcctatctgctgaaagattggctgaaacaaccggatgcgaaccatgatcagatcatagaaattttgaaggcatccagcgccaaccagagttatgcacattgggaagtatgtctgccggatgaaactgtgatcaaaagtaccggtgaggtgacggaactgggaccattgtattcgtttgaggaccgggtaagtaaaaattttactgtttctgagcgcagaacgacattggttgatcaggagacacagatcattatgctgtcaaacagtatttttgatgaaaatggaacttgtattggtattttatcttccgtcattgatctggaggcattcgcggataattttttgtcggtatcctataatctgaaaccggatattatgctgtttgagcgtggcaccggagatgttttgctggattcctggaatgatggtaccttgggaagtgttgaagatgcagaggaagggcggtatatcaaagctgccaaaggataattcctttccagaatgtcccatgata

SEQ ID NO: 13352 - DNA, 18013 bp, Unknown
  gut microbiota DNA sequence
tcggctatctggatctggaagacggtaatctgcaaaatcaggaattattgctacagtaccggaaaaatgcaagagttgcagcaaatcatctgttatcactgatcaacgatgttttgaatatgagcaagctggaagatgataaagtggagtttgcacatgaagcatttgacctgtgcgaactggcaggtgatattctggcactgacggagattcatgcaaaggagacaggtatcactttgcagcattcggattgcagcatgaatatactgcatccatacgtatacggaagtccgctacatgtgcggcagatatttgtaaatattttgaataatgcggtgaaatataatcgaccgggtggaacgatttcatgcaaaatggaaacagaaaagcaggaaggaaatcggatctggtacagctgcacgattcaggataccggtattggtatgaaaccagaatttctgaagcatttgtttgatcctttcgcacaggaaaaagtagatgcgcgaagcgtttaccatggaaccgggcttggcatggcgattgtaaaatcgctagtggacaaaatgggtggaactattgaagtaaccagtaaagtggaggaagaatcgactttccgtgtaatactgccgtttgaaattgcaccgaaagaagaagtcagcgacaggacggagataaatgcggaaacagggattcagggagtaaatattttacttgttgaggataatgccctgagtattgagatcattgcagaactgcttcaggaacagggagcaaaagtaacctgtgcacataacggtcaggaagcagttgatgtgtttgcgacatatccgcaggaaagttttgatgtcattttgatggatattatgatgccggttatgaatggtatggaagcagcgaaggcaattcgcgcactggagcgaccggatgcggaaactgtgccgatcattgccctgacagcaaatgctttcatggaagacagaaagaaaagtcaggaggcaggcatgaatgcacatctgacaaaaccgctgaatatgaaaacgatgatccagacgattacaaaattgctgagaaacgaacagtaacagagtcagattaaatttacatgaactgatagtcagatttgcagagatacaaagaaaaattggattaaatgctgtatgctgtgcatgttacagtaaaagtgctgagaacattcttggataaaagcaatatataacctcagatattacgaaaaaagaaggcgtgatatctgaggtttgttattttatagagagaacttggattattttctatatagaaaactttttgaaaaagatacattttttgtatgccctaaattgactttataaaatcgtgtttttacaagctgctggtatacctgttattaaattgtgctttttacaagctgctgatatacctgttcacagcgtaaaatatcatcaatgacaacccattcatccggttggtgagctgcttcgagacaacccggaccataggacatacagttacggttgtggagttgtccggcaatgacagcagtatctgtgtaaccggtaaaacagctgacctgtggaacttctccagtgacttcctgacaggacagttttaaattttccagaagcggagaagtcggattctgttcaatcggtggccggtcgccggtgattttataggttgcggaaatcccactgacagactgttccgcgtgttcaatggcagcttccacgatggcatttgttttttctgtattcaagggtggaaccagacgcatgtcaatccagactttacagtgatctggcacaacatagggacgataaccgccggtgatctgcccgaaagtgaccgtggaacttcccatatcagggtgaaccggtgcgtacagaatcgcatgtcggatttcacgaataatctctgccatggcggcaatggcatcggcacctttccatggcgtgcttgcatgggcagtgtgtccctgcacatcaatttcataccaggtgcggcctttgtgtgccatctgaatctgtccattggtcggttcagcatcaatcacccagtcgtggtctgtaacccagccagcttgtatacacgcttcggaaccacgcatgaaatcctcttcgtccatggaacagattagttttagcgtctgctttggtgttttaccggatgtttgaagtgtttctgcggcatattgaaatgcagaaaggcaacaggcaagaccggatttcatgtcacaggcgccacgcccataaatttttccatctttttcaatggcatcaaaaggtggcagcgtccatccatcgcctacgacaaccgtatccatgtgacagatcatcaccagtgcaggcagagatggatcaccggtcagctcagctatgagatttgggcgaccgggaagcacttcctgacgggataatcggacattgggatatggcgcaagctgtgtggtgatccagtctgccatcgcattttcataagtacccggatcggtactttcaatctgaatcatttgttttgtcattgtaactgcgcgggattgcagagacatattataaaaccccctttaaaagttcgaaaaagtataaaatattttgaatcaagttttcgaatctatgtatcgaaagcctgaataaaaactaatcgaaattagattaaatgatctaaaatatagattattataacattcattacttgtatgtgccataaattttttgctataaaaagtctggtgtgatagaatagttgcaaatggacaaaactttgccgcgaatatatctgcccggcagaaataagatagtaagaatagaggttgaatggaatgtattatgtaccagatggcacagaaatgtgcggattttatgaatgtgaagaatgcgcaaacagatttttatctctgaagatcggaccaaagctggtgtgcccgtattgtggagaagaaccggatatggagatcggaccggatgaagaaatgccggtggcaaaagagacggcaaaactgctggaagtagtagaaggtgcagaaaatgtggagcgtatggatgcgttactttcattagcagtaactggcggcgactacgagtggatttaaagtaggagattgagaaatgttttttatgatgggaatcacggacggaagaaaaaatctggattataatcagaccgaaatctgtagtgtgtgtggacgatacggacggtttcaggtatttatgacatacaccgtattgtcactgttttttattccgtgtttcaaatggaacagacactattatgtgcagaccagttgttgtcacaccctgtatgaattggatagggaaatcggtcgaagaatcgagcgtggcgaagatgtgcggatcttaccggaacatttgcaaaaagttgaaaatggtagatcggggtatcactatggtggttataagcgttgcacgaattgtgggtatgagacaaccgaagactttgtgttttgcccgaaatgcggtatgcggttgtaacgggaattgtgctgcgtgattatagcggaaattatgtccttgcttggaacgaatatagtgtaatgcggatgaaatttttgaaagtatgattttataagagacaataaggagcatttgtatgtggaaaatcaaacagatcgcagaggcggactttggctgtgaagaacggctgccgggagaaaaattaaaatgtctagttatattagaaaatgaaaagggtgagacacgtcgactggaagtcgaagacgaatggctcaccgaacagggactggacgagggcagtatgtgggatgtttcggataaagattttaaccaaatcaaggaagtcccctgcttcaattgcgaaaagcaataagcaggggtagggacttgcttgtatcaggaggggtgcaagccccttctgataagctgcgaagcagctatttggttatgagcaagtagcgaaggcggattgcgaatatcctttgacttaatgaaagcgcccaaattgattttgtctttctggctaataatcgctcataaagaaaaaatcaatttgggcgctatttacgtcgagatatcctaaaagattctccgatttcgtattatttcaataacctaaattttccctaccatttaatctaaaatctgctttccggtcacatctaaatgataattctcccgataaattaattctgaaatcggcacaaactgaaaccccttttcttccagctgcgtcagcagcgtatccagcgcatccgctgtatatttagccccattatgacacaagataatagccccaccggtcagctgcttattgtcgcagatccgggtaataatatcatccacaccgtaatccttccaatcgagactatcaatagaccactgaatcggataatatccacaggacagcacgcccgtgatgacttcattatcataatctccgtaaggcggtcggaaaagaaacatatcatatccggtcaacgctttcactttttcatgcacagacatgatctcattccggatttccgtatcggacagctgactcatatttttatgattctgactatgattgccaagatcgtgtccaccttcataaattgccttcacatcatcagggtaagaatctacccatccacccgtcatgaaaaacgtcgcatgaacattatgttttgcaagaatttccagaatccgcgcagtatcatcattgccccaggcggcgtcaaacgaaatcgcaattttgggttctttggtatccacacaataaatcggaagctctttgccgtttacagtattgctgacggaaatcactccggttgtcatctgaaaataaatagttatggcaaggatgctgcagactaccaccggcagcagaagggagaagcgtttttcttttttcataggttctccttcggacatgagattactaatatatatgaaagcagacagtttcttatgtgcataaatacaggcgaaaacggattgtatttgcataaaaagaagccgtctgcttttgtgcaaaagaaaggaaatttacaacgttgttcaagtcgaacgcacgtgagacttggtgcgtgattctggtcagcgcaagctgacatcttcttttcagaatcactgcacatcctcgcggagcatttatctcagtcggagattgaactcccactgagaaatacttgttactactcaccacttgcagaagtgggagtctcaactcagactgagatgaaagctatttggtttctggaaaaggctgtgatatgtccgggaaaaaatacagtaagaagtatgtaaaaaataacaataatagttgactttctgtttaataatagtataatcaaaatcgtgcgaaaagtttagtgacagtcaacattttgttaactatttagaatagtagtgttaatccaaaagaaatggaagcgagaacatggaaccgaattatgtgaattgcagaatcggagaaaaaatcaaagatctgagaaatcagaatggtctgacgcagcaggagctggcagaccggtcagaattgacgaaaggatatatttcccagttagagcgtggtcaggtggcaccttctgtggtgacactgttggatctcatcgaatgtctgggaacgacaccgtctgaatttttcaaggagacggaagaagaacatgtggtgtattcggaaggcgcattttttgaaaaaattgatgaagccggaaacagcattcagtggattgtgccgaatgcgcagcaatatcagatggaaccgttgcttgtggtggttcagccaaaggagaaattgcaggaggataagcctcatgagggcgaggagttcggatatgtgatttctggaagaatccgtttgcaccttggtgacaagacatataccgtgaaatccggagaaagtttttatttctgtgcgaacagaaatcattatattgaaaataccggcagccgcccggcaaaatttgtgtgggtgagcacgccgccaaccttttaaccaaatcaaggaagtcccctgcttcaattgcgaaaagcaataagcaggggtagggacttgcttgtatcaggaggggtgcaagccccttctgataagctgcgaagcagctatttggttatgagcaagtagcgaaggcggattgcgaatatcctttgactaaagtaagtatcctgttttcaatgtgaaaaatgagcagcgaaggggacttatcttgagtgggttaaacaggaaaaataattaacatgaggagaaatgggatggaacagccaattttaaatttacagcatctgacgaaatcttttgacgggaaaaagattctggatgatctgagtattgatatcggaagaaatgaatttgtgacattattaggtccttccggctgcggtaagacaacgacactgcgtatcatcggcggatttgccacaccggatgagggaaaagttatttttgaaggacaggatatcacaaatctgtctccggataaacgtcacatcaataccgtatttcagaaatattctttgttttcccatatgagtgttggagaaaatattgcttttggactgaaattaaagaaaaaaagcaaatcttatattcaggataagatcaaatatgcactgaaactggtagatctggaaggatttgaggatcgtcatccgatgtctctctccggcggacagcaacagcgtatcgccattgcccgtgccattgtaaatgagccggaagtactgctgttggatgagccgctgggggcactggatctgaaactgcgtcaggatatgcagcaggagctgatcaaaattaaaaatgagctgggtattacctttatttttgttacccatgatcaggaagaagcactgaccatgtctgaccgtatcattgttatgaaccagggactgatccagcaggtaggaacaccggtagatatttacaacgagccgcagaatgcctttgtagcagattttatcggcgagagtaatatcatagacggtgtgatgccgaaggattgtctggtggaaatccttggatgtccgttcccatgcgtggataccggatttgctccgaatgaaaatgtcgatgtggttatccgaccggaggatatggaatttgtacagccgggagagggtatgatggacggtgttgtgacatccattttgttcaaaggtgttcactatgagatgaaagtgcaggcaaaaggctttgagtggctggcgcacagtaccattgcttaccatccgggtacagagatcggtttgtatgtaaaaccggaaaatattcagatcatgcacaaaccagtgtcttccgcacaggaggttatcaaaaaggatgaataagagaagtttactggctacgccgtatattatctggatcatgggatttacggtattgccgattttgatgatcgtattttatgcgctgggggatggaaacggcggatttacgttggcgaacattctggcgattttccagccggtgcatttgaaatctttattgctggcactttggcttgcactgctctgcaccgccatctgtctggtgctggcatatccgctggcagtaatgctgcggaaattgaacatcggaaaacagggaatgatggcgatcatcgtgatcctgccgatgtgggtaaattttgtactgcgtatcatggcatggcagctattgttatccagaaacggtattatcaatgcactgcttggcgcacttggactgccgggacagcatcttgccaattccaatgtggcaattgtaatcggtatggtatatgattatctgccatttatgatcctgccggtatacaatgcggtttccgagctgaatgaggatatccttgaggcagccagagaccttggcgcaccgccaaaagcagtactgacaaaaattatgatcccgctgaccatgccgggaatcatcagtggaattaccatggtatttgttccgtcactgaccacttttgccattccggatattctgggcggcggtaagatcatgctgatcggaaatattattgaacaggaattctcaacaagtatgaactggaatcttggttctggtttatccattgcgctgatgatctttgtgttgatcagtatgatgtttacttcaaaaacagatgcaggaaaggagcgcagcgtatggtaaagcgattttttatgaaattttatctggtgctgatcattgcgtttttgtatattccgattgcagtgctggtcgttctttcctttaatgcatccagatcccgtgttgtatggggtggatttacactggaatggtatcaaaacctgctacacaacagtgatgtaatggcggcgttacagaatacattgaccattggtttcgcatctgcggcgatcgcaaccggaatcggtcttttggcagccatcggtatcgatgcaatgcgaaaaagaagctacacactgactcttggcgtgggaaatattccaatgttgaatgcagatattgtaacaggtatcgcactgatgctgtggttttccagatttacgaatttaggttatgtaagtattttactggcgcatatcacgttcaatattccatatgtcattttgagtattttaccgaaactgcaacagatggatatgagtgtgtacgaggcggcacgagatcttggcgcaaacagcgtgacagcatttgtacgtgtcattctgccaatgatcttcccgtctgtaatgagtggatttttcatggcgctgacaatgtccatggatgatttcgttgttacgtatttcacaaagggagcaggaatcaataccttatccaccatgatctacggtgagttaaagcgtggtatcaagccggaaatgtatgcactttccacactgatttttgtggtagtattggtgatcttactgctggcaaattatgttccgagaattcatcagaacagagtgaacgcaggtcgcaaagcaactgcgttcatgagcaggtagcaaaagcggattgcaaatgtccgctttagagcagcagtacgataaacggcaaaaaggcggttgcgataaaaatatcagatgggagatgactcccacctctataggtggtgaaaaacaagctagtatcagtggtgggagccaatcccccatctgatatagcctccggcaggattacagaggtgcgcagttgaagtatgtcatgcaattgcatgacgcgcacctcgcaacaagaatgccggagcattcttgaattttgtaagaaaaacatcttttatatagaaaaaagtattttatggcatagaacacgccgggcgaatgggaaaggtgacagtatgataaatagaaattggaaacgccgggtggcaatggcgctgtgtgttgccatgaccggaattttagtcggctgcggtgctaccggagaagaagaatcttccgtggatatgtccgaagctggtggaaaagataccattgtggtattaaactatggagaatatattgatacttccatattaaaacagtttcagaaagagaccggaatcaaagtgctttatgaggaagcaacgacaccggaggaaatgtattccaaatatatggcgagtacgattccatatgatctggtctgttcttccgattacatggtagagcgttttatcgaagagggtgaggcggaagaaatcgattacagcaaaatgcagtatatcgataatattggtgatctttactgggaaatgtccaaatcttatgatccggaactcaaatacagcgttccgtatttctggggaaccgtaggtatcttgtacaacacaaatatggtggatgaggagatcacaagctgggacagtctgtttaacggaaaatacgccggagagattattatgcagaacagtatccgtgatgcgtatatgtgtgcattgaaatataaaggatattctctgaacacaacagatcgtaaggaactggacattgcacagaagctgctgatcgagcagaaaccggatgtggaagcatatttcgtagatgaagtccgcgaggagatggttgccggaaatgcggcattagctgtctgctattccggtgaggcatatttagccaacgattatgatgaagatctggaatatgtcgttccggaggagggctccaatgtatggtttgattcctggacaatgatgaaaaaaggagaaaaccatgagggtgcactgaagttcctggatttcctctgcagagaagatattgcgatgaaaaactttgaggaaatctattatccgacaccgaatacagcagtatacgatcagctggatgaggagacaaagaatgatccgttgattttcccgagtgaggagacactggaaaaatgtgaggtatacaaagcattggatgcggataccacagcatattacagtcagctctggaaagaacttaagacaagctgacgcttgcaggcaggatactgacaggtatcctgtttttttctcttgtggaaatatcctgtttgcgttataataggaacgcttatggaatgaagaaaacgattcagaaaaatttatcagtttgtgtgattcaaaatcatgtgtagattttactagcatatgaagataaactgaaaaagttggatgttgaatcgaaataaatatacagaaagaggtagagttatggctaaagtcagaacaagatttgcaccgagcccgacaggccgtatgcacgttggtaatctgcgtaccgctttgtacacatatctgatcgcaaagcacgagggcggagattttgtattaagaatagaagatactgaccaggagcgtttcgtagaagaagcactgggcatcatttaccgtacactggaaaaaacaggtctgatccacgatgaaggaccggacaaagatggcggctatggtccgtacatccagagtgagcgctgcaagagtggtctttatctggaatatgcaaagaaactgatcgaaaaaggagaggcatattactgcttctgcgacaaagagcgtctggattctttaaaacagaacatcaacggtaaagagatcagcgtttatgacaaacattgtctgcatctttccaaagaagaaatcgaggcaaatctggcagcaggaaaaccgtatgttatccgtgccaatgtaccgaatgaaggagagacaactttccatgatgagatttacggagacattacacagccaaactctgagctggatgacatgatcctgatcaaatccgacggatatccgacttacaactttgcaaacgttgtagatgatcatctgatgaacatcacacacgtagtccgtggtaatgagtatctgtcttctgcaccgaaatatacaagactgtatcatgccttcggatgggaagagccgaaatacatccactgcccgctgatcacaaacgaagaacatcagaaactgagcaaacgtagcggacattcttcttatgaagacctgatcgaacagggatttttatctgaggcagttgtaaattttgttgcactgcttggatggagtccggtagacaaccgtgagatcttctccttagaggagctggtgaaagaatttgattatcatcacatcagcaaatctccggccgtttttgatatggtaaaattgaaatggatgaacggagagtacatcaaagcaatggattttgatgcattctacgagatggcagagccgtacatcaaagaagtggtacatcgtgattgtgattacaagaagatcgctcagatggtaaaaacacgtatcgagatcttcccggatatcaaagagcatattgatttcttcgaggcagttccggagtacgatgtagcaatgtatacacataaaaagatgaaaacaaatgcagagacatctctggcagttttaaaagatgtgttaccgttactggaagcacaggaagattacagcaacgatgccctgtatgcaatgcttagcggttatgtaaaagaaaacggatacaagaacggttatgtaatgtggccgatccgtactgcactttccggaaaacagatgacaccgggtggagcaactgagctgatggaggtactcggaaaagaagagtccatcgcacgtatcaaagctgctatcgaaaaactgacagcagaagcataagaaaaatgaatatcataccagatgttgtgtcatggaaatatgacacagacagtttggttattagatctgacatcaggggaggggcaagagtacctgatcacgacggaactctttccctctctttttgtgcgtaaaaacctctgtttttgaggaataggtgtgtaaaaaaatgcacatacaagatatagtattgatatttgaaaaacattttttgtcaattgtgcaaagtgctatttttgcattttgaaattttttgaattaaatggaaaaagttgcgaaaaaaaggcagtattctgagtgatttcaaaaagtcaatacgttaactgaaatttgtggatattgatagaaaatcactagatgtaggatttgtaattgaaaatcaacactagatattgtacaatggtcaagaacggtcctccagagaagaagacagggcttcgaaagggatcaacaggatcgttataatagaaattcaactgtttggagagaaaaaagggttggatgttacttgagacaactctgaacagcagatgaacaaataataaaagtaagagaaaaagtggtaagaaagggcgagtggaatgaagattattaaacgtagcggatcagaatcgcagtttgatctggataagattatttccgcagtgatcagggcgaatgacagtgtggcagagactgagcggatgagcaaagagcagatcgcagttatcggagccaatatgcgtacgatttgtgaaggcatgaatcgtgcactgagtgtagaggaaattcaggatctggtagagaatcagatcatgaaccagagagccttttctgtagcgcgtaactatatcacctaccgatataagagagcgctggtgcgtaagtccaactcaacagatgagcagatcttaagcctgcttgagtttgacaacgaagaagtaaaacaggaaaactccaacaaaaacccggcagttaacagcgtacagcgtgactatatggcgggtgaggtaagtaaagatattacaaaacgtttccttctgccggaagatatcgtggatgcacatgagaaaggtctgatccatttccacgatgctgattattttgcgcagcatatgcacaactgctgtctggtaaatctagacgacatgctggagaacggaaccgtgatcagcgagacaatgatcgaaaaaccacacagcttttctactgcatgtaacgtagcaacacaggcggttgcacagatcgcaagttctcagtatggcggacagagtatttccctgtcccatctggtaccgtttgtacaggtaagccgtgagaaatatcagaaagaagttgcttacgaattcgagcagagtggtatcgaagcagatgaagagacaatcaataaagtagcagagcttcgtgtacagaaagaagtaaaacagggcgttcagatgatccagtatcaggtgatcacgctgatgacaaccaatggtcaggctccgtttatcacgatttttatgtatctgaatgaagttccggaaggacgcaccagagacgatcttgcaatggttattgaggaagtgttaaaacagcgtattcagggtatcaagaatgaaaagggtgtttatattacacctgcattcccgaaactgatctacgttttggaagaagacaatattcatgaggacagcaaatactggtatctgacaaaacttgctgcagagtgtaccgcaaaaagaatggtgccggattacatctctgagaagattatgtttgaaaataaagtagacaaaaacggtgagggacattgttatccgtgcatgggatgccgttccttcctgacaccgtatgtagatccgaaaacaaatcagccgaaatattacggacgtttcaatcagggtgttgtaactgtcaacctggttgatgtagcgtgctcttccggcggaaacatggaaaaattctggaagattttcgatgagcgtctggaactttgccaccgcgcattagtttgccgtcatgagcgtctggaaggaacaccttctgatgtagctccgatcctgtggcagcatggcgcattggcaagactgaaaaaaggtgagaccattgatgaattgcttcacggtggatattccacaatctcactgggatatgcaggtctgtgcgaatgtgttcgttatatgacaggaaaatcccacacagatccaagtgcaacaccgtttgcactggaagtaatgcagcatatgaacgatgtctgcaacgagtggaaagcagagcacaacgtagacttcagtctgtatggcacaccgcttgagtccaccacttacaaatttgcaaaatgtctgcagaaacgttttggactgatcccgggtgtaacagacaaaaactacatcacaaacagctatcatgtacatgtaacagagaatatagatgcttttgaaaaactgaaattcgaagcgcagttccagaagctgtctccgggcggtgcgatcagctacgtggaagtaccgaacatgcagcagaatctggatgcagtacttgcagtaatgcagtacatttatgacaacatcatgtacgcagagctgaatacaaagagtgatttctgtcaggtatgcggttacactggtgagatccagatcgtagaggaagacggaaaactgatctgggagtgtccgaactgcggaaaccatgatcaggataagatgaatgtggcacgtcgtacctgtggttatatcggaacacagttctggaatcagggaagaactcaggagattaaagagagagtgcttcatctgtaataataaagaaaacccccaaattttttttcggggattcgtaacaaaaacgataaaaaagactgctgtgtaaagttgtgaaagacattacatagtggtcttttagttcttgtaaaatagcatactcaaaaagagcatatggtattataaataatagggaatgatacagagacatagatgctggaggaataaaacaatgaaattaccaaaagatcctgtgatgcttttaagcgttgtaaatacagaactgagagaccattatccatcattggcagaactggcaaaagcgtatggtgtaacagaacaggaaattatagatcagcttgcacagatcaattatgaatataagccggagacaaatcagttccgataagctgaagatagtatctggaggggatagaacatgtattattgtaatataaaaaaatcagatattgcggacggaccgggagtacgcgtaaccttatttgtgtccggatgtacgcatcattgtgaggaatgttttcaaccggagacatggaatttttcctatggtcagccttttacaaaagatgtagaagaagaactgatggatgcattgcaacctggatatgtgtcaggtctgacattacttggcggggaaccatttgagccggagcatcagtacgtgttgcttccgtttttacagagagtgcgccgtgaattgccgaaaaaaacaatctgggcttacagtggctatgtatacgaagaactgatcggcaaagagagcggaacagggagagcacgctgtgaggtgacggatgcggtgcttgcttgtgtggatgtgctggtagacggagaatttatgaaagataagaaaaatatcagtctgcagttccgaggatcggaaaatcagcgtctgatcgatctgagaaaaaccgaagaagccggtgaaatcgtatggtgggacggaaaatagaagctgcatatattccggttggaagttagttgctgtcaaaattgatgtcaaaacataaaaaataagggttttcgggactatgaaaaatgcccggaaacccttattttatgcggataacaggacttgaacctgcacggtctcccaccagaacctaaatctggcgcgtctgccaattccgccatatccgcaaagtaatgaacgcgctctggcgcgtctgcctaccattgaacgttagtagttcaatggtcatgaattccgccatatccgcaaaactaaaaaatttagtcacaaatcgaattatacagaatacaaaacaaaaaatcaaccgttactttcattaaaataatcattaaaaattgtgaaaaattatggttccgtaaatggatagtgataaatttgttactatttatatattttacctctattttacgttgaaatttcttatattttacctattttcaataaattacgtttaagctaaagacaaatttacaatttactgttaaaatagattcgtatgtaaaaatctatttacaatttttttacgaatattacggaggataaatatatgtctatagtagaagtgttttcactattgggtggcgttggattgttcctttttggtatgacgatcatgtccgctggtctgaaaaatgcctgtggtgataaactccagacaattttggaacacgcaacaaaaaacaaattgattgcaattgctgtgggacttggtatgacgatactggttcagagttcttcggctacggatgttatggttatcggatttgtaaactcaggtctgatgaacttgggacaggcgatcggtgttattatgggtgccaatattggtacaacaatcactgcacagatcacagcgtttaacatcagtacatttacgccgctgcttctttttgcaggtgcgatcatgtatctgtttatgaaaaatgattttgtgaagcatgtaggatctgtcatcatgggctttggtatgttattccagggtattaccatgatgaaagttgcgattcatccgttatcccagagtgaaggatttgtttcattcttatccacattgaacaatccggcacttgcaattctctttggtattgcatttacggcattgctgcagagttcttcttcttcaaccgttatttttcaggcgtttgccattcagggactgcttagctacaacgtagctgtttacctggtaattggtgcggcaattggttctgttacaccaaacctgcttgcaagtctgactgcaaacagaaacggaaagagagcggcaattttgaacctgctgtttaacgtattccgtgcgggaattctggttgcattgatcaatatcttcccaatcatactgacaggaatccagagtctgtcaccgagcgatgttggacgtcaggtggcaaatacgcatacaattttcgcaattatcgcggtactggttgagttatcgtttacaaataaactgatctggctggcagagaagattgttccggtacttccggaggaaaaccagcagttagaagatcgttctctggtatatatgacacagctgacaaaagtaccggctccagttgctttgcgtcagacacagcgtgagatcacacgtatgggacatatcgcagctgacaatctgaaacgtgcactggattgcttcttcaattacagtatgtcaaaggcagcttccgtacggtctcatgaggagagtgtcaatatcctgaatcatctgattgcagatgccatggtagacctcagatccctggatctgtcaccggaaaatatgcgtcgtgtgtctatgatgaccattgcggttactgatattgagcgcttatccgatcatgcggaaaatattgtagagtacattgaacagatgaatgcgaaaaaagcagaaatgtcagaggcagccagaaaagaacttctggatatgtctcaggatgcgttggatgccgtttatctggcgctggatatttttgaaaaagatgattacagcaagctggatcagattgaaattctggagcagcatgtagatgatcatgagaaagatctcattaataatcacattgagcgtattatgaactctatgtgtaatccacttggtggagttattttctccgatctggttaccgatctggagcgatgttccgatcatgccattaatctggcatacgcattaaaagaacgtccatctgaattggacgcaccgaaattagtgtaaattttacgggtaattgtgtggtttaaattcaagaatgctccggcattcttgttgcgaggtgcgcgtcatgcaattgcatgacatacttcaactgcgta

SEQ ID NO: 13353 - DNA, 947 bp, Unknown
  gut microbiota DNA sequence
aggttcgacaagttccggcagatcaaccggttcctggaatttatcgaggatattttaccacagcttgattctggaagagagcttacaattctggattttggctgtggaaagtcttatcttacatttgctatgtattattatcttcatgagctgaaatcttatgacatccggatcatcggtctggatctgaagacggatgtaatccggaaatgtaacgggctggcgaagaagtatcagtatgataagctgacgtttctggagggaaatattgcagactatacgggcgcggaggaagtagatatggttgtgacacttcatgcctgtgatacagcaacggattttgcgctggcaaaagcaattggctggaatgcgaaggttattttatcggtgccttgctgccagcatgaactgaaccggcagatgaagaatgacgtgctttcaccgatcatgaattatggacttttgaaagaacgtatggcggcacttgtgacagacggactacgtgcggagtatctaaagagggagggatacgacgtgcaggttctggaatttattgacatggaacatacaccgaaaaatattctgcttcgtgcggtgaaaacaggccgccgggcagacaatgaagagagtatccgcgcatgcgagtcatttcttcgcgtgacaccgacactggggagactgctagacgaaaaaggggagctttaaatgaaatggaaaaatcgcgtgatccacgcaggggtactggttctggtatttcttgctgcggtggtcgtatttggctatgtgacaaataaaaagaacagtaacatgacaacagatatgggggcagcaacacgtccccagattgcgttttcctataatggttattcgctcaatgacctgcccggatataagaatgagatggatttgacaggcgtacgtgattccatcacaccggtcagcaatgg

SEQ ID NO: 13354 - DNA, 1754 bp, Unknown
  gut microbiota DNA sequence
gaaacagtatgctgctgcgactccctgtatctctgacacacagattcacgccgccgcaagaatcatggaagcatgtatttcttccatcctgtacaaaaaactgatttccatcgaaaagcaacaatttgaacagaacatcaacacttacatcctgaatcacctgaccgaagatctgtccgtagaccgcctttgcgaacacctgcatctgagccgccgcaaactctacgaatattcagaagaatttttacattgcagcatcgccaaatacataaaaaaaatgcgcctgcaacatgcgcagacactattaaccgaaacaaatttaccaatttctaccatttccgaacaatgcggattttccgactacaactatttctgtcggattttcaagcaggaaaatggtatgtccgcacgaagctatcgcgtagcacagcagacataattttctgtgatactatatttttatttacggaacacacactttatataacacaatatgtactagacacacatattgtatttaccttttgctgtaactctcgctttgtgtcgtggtgatttcacgcactttttgttatcgtttttcctgaaaggaggcaaaagcaacaacatgtatcagaaaaagatcggtctttttttaaaagaactcagaaaagaaaaagaacttacgcaaagtcagcttgcagaacagctcaacgtatctgaccgcaccgtatcccgctgggaaaccggaacgaatttaccagatctgtctgtattagttgaacttgcagatttttatgatgttgatatccgtgaaatcatcgacggagaaaggaaaagcgagaatatgaatgtagaaatgaaagacactttaatgaaagcggcacaatatgccacagaagacaaacacatgcaaatgaaaaaactgaccggatatatcctgtcagccttcggatgtttcctgattttgtccggatttaccgtatttccaagtgaaagcggctgggcagcaaaatttgctattttaggagctataatcgtaaccattggaatcttccagttactcaaaaaacgcagattactgaaagccattgttatctttttcgctatcctatttggcatgatctggctggacttcgccagtgtatgctatatccgacaggcaccacgttttgcctattccgtagaatacagcgatgaaactgtcatttaccatgccccgttctactccgtatacaaatacggtcgggacacacttggagaatactatcaggtttatattggatccgataatttataaaattatttttcataatttaccagtgcaatacatatatttaaaagaactctgaaaatgccagtttccagagttctaaagttcattttggagaactacaccgtcaggctagtgctgccgtttgtctctgtctaaccatttgcaaatataataacccactatagatgccaatacagagataagaaaagcaagtatgtattccattagactcacctccttcctactggaaagagtcgacagcaataacataatatcacgaaactttgttcgattcaactaaaaatattgttcatttagatattgattttttcaaaggaaaagtttattatagtggtgagtaagaaaagtatgtattccattagaatacaaaaatccccgaagtgccagcttcgggggtttttaattctcaacaaaaaacatttttcatgacgtaaataggggactggattcattttttctcagtgagcgattatttgat

SEQ ID NO: 13355 - DNA, 9915 bp, Unknown
  gut microbiota DNA sequence
cgcccccaatttattttttcttgatgagcgattgttggccagcaagataaaataaattggggacgcttccactacctaaaacttagccaccaaagaaacttaaaaaactaaagcatcttttaatgacgatatttattagcttccttcaaacgtgccatcgcacgtgccaacgaagccgcatttcgatgatactccatcttactctgatgctgccgcatacgttcttctacacgttcttttgcttcccgtgcacggcgcacatcaatttcttccgggcgttcaatcgtatccaccagcacttccacctgattatcggaactgacctccacaaatccgcttccgcaaactgccgggatcatttttccatccgatgtcatgattcgtacttcgccctcttttaacgcaatgacatattcctcatgatttgccataatctggatttctccatccacagcaggcagtacgatggaaaccgcctcatcatcataaaaaatcttatcatatgcaatgatttttaaatgaaatgtagccatagtcacacctcactaatgattaccgttctttgctttttcaatgacatcatcaatggttccgacattgaaaaatgcccattccggatactcatccatctcaccgtcaatgatctttttgaaacctttgactgtctcttccagcggtacatatttaccaggaattccggtaaatgtctcagctacatggaacggctgtgacaggaaacgctgaatttttcttgcacggtatacagtcgttttatcctcttcggaaagttcttccataccaaggattgcgatgatatcctgcagctctttgtaactctgcagaatctcctgtacacgacgggcaacttcgtaatgctcctcaccgacgatatccggctccagaatacgggagttggattccagcggatcaacagccggataaataccctgctcaacgatctttctggaaagtacagttgttgcatccagatgtgcgaatgtcgtagccggggctggatcagttaagtcatcggccggtacgtaaatcgcctgtacagatgtaacagagccttcttttgtggaagcgatacgctcctgcagctcaccgacttcgtttgccagtgtcggctgataacctacggctgacggcatacgtccgagcagcgcagaaacctcagaacctgcctgtacataacggaaaatgttatcaataaataacagtacgtcctgatgctctttatcacggaaatactctgccatggtcagacccgtctcagccacacgcatacgagctccaggtggctcattcatctgtccaaacactaaggctgttttttccagaacgccggattctttcatctcagtccaaaggtcattaccctcacgggaacgctctccaacaccggtgaaaatagaatatccgccgtgctctgttgcaatatttcggatcagctcctgaatcagaacggttttacctacaccggcaccaccgaacaaaccgatcttaccacctttggaatatggtgccagaaggtcgataactttgatacctgtctccagaacctctacaactgggctctggtcttcaaaggatggcggctctctgtgaatacaccagttttcctttgactccaccggttctccatcatcaattgcttcacccagaacattgaaaagtcgtcccagtgttgcttttcctaccggaactgtgataccagcgccggttgctgttacttccatatcacgatgaagcccttcactggaagcaagcataatacatcttacggtatcatttccaatatgctgtgccacttccatgacacatttttttccattattatcaacttcgagtgcatctttgatgcatggaaggttatggtcggaaaactctacgtctacaacaggtcccatgacctgaacgatttttcctttattcatatcgcttcacctctcttattttttcttgctcttctgcgccttggcacccgcaataacctcagtgatctcctgggtgatcgccgcctgacgcacacgattgtactcaatttccagatcatgcagcatcttctttgcactgtctgtcgcagtctgcatcgccatcattctggaattgtgctcactggcataagactctaccagcgcgccataaataaaaccacacactacgttcggaaccagattatccaacaatgtctctaccgacgggtgaaacatcatctgatcattgtagccctgcagatttttgtgaagatactcttctctgtgcaatggaaggatctggaacatatccgcttccatcttgaaggcattgatcatttttgtatagataatgtaaacctcatccagttcccctgacacgtatttatcaatcatctgcagtccgatatgacgggcacgataaagggtcgggttctgaactgtgtagctgaactcaccatcaatgtaaacgttctttttcataaaatactgacggccaagctcaccgactacaaacagctcactctgcggatgcttttcaatctcctctgatgcaagtttcagcacgttgtgattgtaagcacctgcaagacctttatctgcagtaattacgatataaccacgttttttctgatcctccgcaacaccttcttttccgaagaaaatattcttggtatccggaacgcactgcataaaacgtgccactgcatttcgctgaccaaagaaaaacggctctgtatctgccagacttttctttgctttctgcatttttgatgaagatatcatgtacatggcactggtgattttcatcgtatctttgatactctgcattctgctctgtatctctcttgcacttgccatgatattctcctttctgccctttttcactcagatagctgctcatgcagatgtatgttctgtacgaaatgcatgaactatttaaactatctaaatatacatgaaaataactttattttacgtactcttttgcggcagcgagaatcttgtctccaagttcatcggacagaacttttgtctcattcagctcatcgatgatctccggatgtgcatttttgatatattccagcatacccttctgggtttctttgattttcttcacatctacattcaggaaaatcttgtgtgttgctgtccacagtgtgataacctgctctgccatgctaagcggctggcaaagcggctgttttaacagctccatcagaccttttccgtactgtaactgctcttttgtatcatcatccagatcagaactgaactgggtaaatacttccatctcacgatactgcgccagatcaatacggatacttccggctgcttttttcatcgcttttgtctgtgcggcaccaccaacacgggatacggacagacctacatttaccgccggtctcataccggagaagaataagttgctctccaggaaaatctgaccgtctgtgatagaaataacgttggtcggaatgtatgcggatacatcgcccgcctgtgtctcaataatcggcagggctgtgatggaaccgccgccaagtttgtcactcagacgactggaacgctccagcagtctggaatgcagatagaaaacgtcacccggataagcctcacgtccaggagaacgctccagcaacagggataatgcacggtaagctaccgcatgtttggacagatcatcgtaaacgataagcacgtcttttccctgatacataaaatactctgccatggcagttcctgcatacggtgcgatgtactgcaacggagccggatcactggcagttgctgctacgatgatggaataatccatggcaccgtgttttttcaatgtagatacaatttttgcaattgtagatgctttctgtccaattgcaacataaatacagatgacatctttgcccttctggttgatcattgcatcggttgcaatggatgtcttacctgtctgacggtcaccgatgatcaactctctttgtccacggccaatcgggaacatggaatcgatggaaaggattcctgtctccattggtacgctgacagatttacgatcaacgatacccggtgcttcattttcaatcggccggtaatcatcttcctgaatgtcaccctcaccatcgatcggtgctcccagtgcattgatgattcttccgacaaatttatctccaaccggaattccggctttctttttggttcttgttaccttggttccttccttgatccctgtatcacggccgaacagaatgacacctatctcatttcttctgacatcctgtaccataccttttacgccgttctcaaagacaacgatctcaccatacatggcctggtcaattccatagacagtggcaattccgtcaccaacccagatgacatgaccaatttcccgatccttcgcttcaaaatcgtaattttcgatttcttccttcaggatggaaataatatcctgtgaactgatagcgctcattgtcctatcacctctttcttttaccttttacttatacttctgcatgatggctctgaaccattccgagctgttcctgcatgccgcggatacgtccgctgatgctccaatcccattcacggccgtttgcagtgaggacaaaacctcccaccagacgctcatcccggatcatctcaagctccacctgatgtgcatcaaactcttccagcagaaatttcttgattccctccaactggttatcatccggtgcagttacatatcgtaatgttgcatttactactgactgatgttcgtttgcatacattttatattcctccacgatctcttccagatattccacgtcagaataatcacagagaatcttcataaaattctgtaactttttttccgggaaaatacggtcaaccaccgcatgtttttcctctttgtaaacacttgggtctgtcagcacacgctgaagttcaggactttcctgataaatctgcgctgcattttcaagatcctctaccggagcgttcagctcccacaaaactcttacatatttagccgttgttgctgtcatgtttgtcacccgttttactcaaaaactcattgtaaagctgttcatccgtgaccttactgctattttctccgataattttaactgctgcagccatggccagagtaccgatttctttctgtacactctgaagtgctctgtcacgttctttttccatatcctgatttgtcttctcaagcagatctgcggatcgtttctccgcatcggaaacaatctgcttgtactgtacatccgcccgctctctggcgtctgccacgatctgaattgcctcctctttggctccctgcaaagatgcctcatactgagtttttaactcctgtgcttcggcatttgccgtatctgctttttcaaactgttcagccaccatctgttttctcttttcaatgatattcaaaaccggcttgaacagaaactttctgatcaggaaatagaagatcaacaggttcacaatgatccatataaggtttgaatcaattctcagcatcctgaaatcctccttctaaaaacaaaatctcacgtctttgttttttatttgcaaaggaaaatgatcagaatagcgacaaccataccataaatagcagttgcctctgccagtgcacaaccaagtaataagttcttgctgatcttgctgtctgcttccggctgtcttgctacagcgtctactgctttacctgttgcgataccaatacctacacctgctccaattcctgctaatgctgcgataccagctccgagtgcgatcatcataataattatctccttttctcacttcatattctgcctgtcacattatgctttcatttttgttattttgtaaaactcacataatttgtgagatcattgacaggacttttcgatatgttacgttacaggttttctgtcaaaatacattgacctttactccgcctgcaactcaatagcttccttgatgtacaacgatgtcaggaacacaaatacatatgcctggatcaatccatcaaaaatatcaaaatagaaactaaataccagcggtaccaccatcggcacaaccgccttgatcagctccataataacaaatgcgccaagtacatttccgaacagtcgcaaacataatgaaaatggtcggatgaagatttccaaaatgttgatcggtgtaataatcgcgacaggctgcgtaaatcctttcgcccacttcttcacaccttttgcacggataccggcggtttccaccagtatgatactcatcaacgcaagagcgatcgtacaattcaggtcctttgtcggaggcttaaatccaaataagccaattacatttgcaataccgataaacagaccgacgctcatcagataaggaatataaccttttccttcctctccgagcagcccttcgaaaaatccatagaattttccgatacacacttccagaaacaactgtctctttcccggattctccacgcttaagttccgcgtcaggaaaatcgatgccactatgacgactgccataatgatccacataacgacaactgattctgcgattttgattccaccaaaaatgggtatcgtgaacactgtcttgacactcaattggtcgatcaactcatctaccagtccgttcgtagcggtcacctccttcttttctctttcttctattttttgttttctcctgaaaaatgttttccaatcattacagttggtaaagcgaacattcgcaatccacttttgctacttactcatgaacgtaatcgccttacgacttgcattcaatttgtaaatgatactgctttctcataattggtactaccattatttcagagaaataaaagaccgtgcggttgctctttcaaaacccattaacctccgttggtcttttcttgtacatatattaatacaatttccagattttgcaatcggcaaaatttcccaaattgtttttagatggaaacaatttttcagcaaaatcacgattgacaattttccatttaacagatcatttctctttcgtgcacttttttacttcttttttcggtaaatttgcatactttacgaaaaaagaatcttacaaatggacctgcgtagaacaactgccagaacaatgccattgggaaatttcgcgctgcggtctgcaaccagttgccaagcagcatatccgttcctttaaaataaatcaataatattgattaaaataaatcattctgctactataaacattatgttatactctgaaacatgaaatgcgaagacaaggaatagtaactgtcctacttttttcagagagttgccggttggtgtgaggcaataaaagaaatacagtgaactcgcctttgagcagcggttttgaacaagattacattcttttatttgtcaattcaattcgaacttttaaaagactacagatttaatcaacacagtctgaattgaggtaaaacatatgagtatgagttaaaaatgtaattaattatagtagaaactgacggaatctcaccgttacaggaggacagcatgacagtgctgatgagtgcgtatttgatacgaagtagagtggtaccgcggaagaatggctttcgtctctacaactattacatggttgtagggatgagagccttttttatatgaaacgaattattatatgatagctaacagataaggaggaacagaagactatgaaacattacgaaaactatgaaagagcttattttatgccaccagaatgtacgtatgactgggtgaaaaaagaatatttgactaaagcaccaatctggtgttccgtagatttaagagatggaaaccaggcgttagtagagccgatgagtctggaagaaaaaattcagtttttccaaatgcttgtaaaaatcggattcaaacaaattgaagtcggatttcccgcagcttccgaaactgaatatgattttatcagaacattaattgagcaggatatgatcccggaagatgtcaccattcaggtgcttacccaggcaagagaacatattatcagaaaaactttcgaagccattgaaggcgctcagaatgtcatcgttcacctgtatctttccacttctgtggcgcagagagaacaggtttttcataagagcaaagaagaaatcataaaaaccgctgtagatggcgccatcatggtaaaagaacttgctgacaaacaaagtggaaacatttatctgcagtacagcccggaaagctgcaccggaaccgaagtcgattacgcagtcgaaatctgcaatgcggtacttgatatctggcagccgacaccggatcataaagccattatcaacattccggctaccgtggaaaattccataccgcatgtgtttgccacacagattgaatacattcacaaacatttaaaatacagagatgccgttttattatccctgcatccacataacgaccgcggctgtgctgttgccgacgcggaactcggtgttctggcaggcgcagaccgcatcgaaggtacattatttggaaacggtgagcgcaccggaaacatggatatcgtcaccatggcgatgaacctgttttcccatggtatcgatccggaacttgatttttccgacatatcagcaatccgcgcaggttatgaaacttacaccggaatgaaagtgcatgaacgtcagccatacgccggcgatctggtatttaccgcattttccggttctcatcaggatgcaatttccaaaggaatgacctggcgcgaggaacacaaaactgacaaatggaccgtgccatatctgcccatcgatccgaaagatatcggacgcacctatgacagtgacgtgatccgcatcaacagtcagtccggcaaaggcggtatcagctacattttaaaacagaactttggcgttgttcttccagaagcaatgcgtgaagacgtgggttatgccattaaacaggtatccgacgaaatgcatcaggaactgtccccgcagaacgtatatgaaatatttgaggagcaataccttcactccatgaattacttccgcattaccgaaagccatttcaaacagttagcggatggcatcatggcagaagtcaccattttaaacggtgaaaaagagacagtcatcgacgcaaacggaaacggccgtctggacgcagtcagcaacgcagtaaaacagttcttcaacattgattacaccttgatgaactacgaagaacatgccttaacccagacaacttcatccaaggcgattgcctatgtctgcatcaaaaaagacaacacgacttactggggtgcgggcatcgacgaagacatcatcaaagcctccattcaggccctgtgcgtcagcgtcaacaaaatgctcgccgtacaaaaaggcaacgcctgcgaagacgtccgcctgacaaaaatgctgaactacattcagaaccattaccagaacgtgacattagcagatatgtcacaggaatttcacctgacagagccatacatcagcaaatacatccgtgaaaaatccggcgtaaccttcggcgaacacgtcacaaacatccgcatgaaaaaagcatgcaccctgttaaaaaacggaaacatgacagcagaaaacatcgcggcctccatcggctacccaaacgtcgaacactttagccgcacctttaaaaagaaataccatatgactccaatccagtatagagagtcaaaaaactagatttgcaaaaatgtattcaagtaactccttccatcgctcttattcaagaatgctccggcattcttgttgcgaggtgcgcgtcatgcaattgcatgacatacttcaactgcgcacctctgtactccattttttatttggtacaatatatgctattttttccatacacaccctccatcaaaaacacagcttttctaatccttcgtctgtaaattcaagtcgaacgcacgtgagacttggtgcgtgattctggtcagcgcaagctgacatcttcttttcaga

SEQ ID NO: 13356 - DNA, 1146 bp, Unknown
  gut microbiota DNA sequence
caattatcaattccaactttatagctgttcagcaccagatcatagttcatcggatctctccactcaccgccgcaggtgtaatggttataatactcactgcgatatttatttgtctttttgtacatctgcagcgcacgctgttccgatacgtttgtccgctccatgatcgtatgaatgcaggcgctctgcggtgcttcgacaaagacgttgatgacatttccatatggtcgcaacacgaaatctgcacattttccgatgacgataaaggattcgcttcgtgccatggtctgaagaatatctgcctgaatgttaaacaggttattgtcggaagtaaagtctttttctcttggttccagcactgtggagaatggcatggatgccagtttttttgccagaaaaccgccgttcagacgttcatccatatcgacaaacagctttttcatcgatgccgcttttttcggaagccatcgtcagaatctggcgctcatagcacggaataccaagttctttggacaatgccagtccgacactttttccacctgcaccgaaatttcgggcaatggtaattacataatttgttcgcattttctcacctcactcacacgttcaattgtaaaatgctattctacttgtagtttttattctgtttttccatgtgaaatagtaaaatactgtcacagattatcttttccatcccacatggttttttcttacatatttttctgaaaaacttgtattcgtttgtattaatcttttttatcgcatttcagaaccgcatttaataatacagaagcgcccatggtacactgttttgtggatgtaaactccggttcgcagtgggaatgaccatctttgggaggaacaaataccatggttgtcgggagcatgtaggatgcaaactgtgcatcatgtccggcgccagagttgattctctggttggagtaaccaagttcgtcaacagcttcctgtacatagccaactaatgtcttgtcgtagtaaacggtatcgcgcgtccatgctacttcataatccactttacattttgcaacttctttcggcagctcccatatgattttcaaaccggaaggagcgtatgatgtcgctgaccggaagatgtgaggtgcacgcatgactgcagggagcgtt

SEQ ID NO: 13357 - DNA, 1613 bp, Unknown
  gut microbiota DNA sequence
agaaatctggccgttttttcttgctaagcgattgttagcgtgcaagacaaaacgaccagatttctttttcaacacgtacattcatttttataaaaaccatcataataagtgtttatttgcttgaaaagccatcaaaataatggtttaataaaaaagaggtgatatatcatatgaataatataaactttgcaattcaggaatatgtgaccggttcagatataaaaagagtacgaaaaacattgcagttaacgcagaagaaatttgcggaattattaggtgtttccaaagcaaccatggaacgatgggaaacaaaagaagataaaattaccggtccggttgttctattattaaaaatattagaaaatcatccggagtacgttatgaaaatacagattccggacaaggaatatggtttgcgtatgtggtatatgcatgagcaggaaatatgtacgctgatcgatgtagacgaactaaaaaaacgggtaaaaatcaaaaattatacagataatattatgtttcaggcttttggaaatctgaaggaaccaacctatgaagactatgaggcatttttagagtcccgttgttttccaaaaagccgtgataaaatgaaactgatattaaaagatcttgatctgccattttatgatccgctgatgatcattcagaagacggaaggcagaatggcagaagatcatttttggattcgaatagagaggtgagaaatccatgatcgaattgtttgaacagaatgaacgaaaagccgacagacagtcttccaagggaaatcagcttaaatgggaaaatgaaggtatctggtacaaagcggattgtaccggatatgaaggacttgccgaatatatggtatcgcacttgctggaaaaatcttctttgggaaaaaatgaatttgtacaatacgattatgaacagataaaatataaaaatgttttttataatggtgtaaaaagcaaaaattttttgtatgatgactggcagattataaccttggagcgcttgtttcaaaattttttccagaaaagtttgtatgaagcggtatggcatatacaatcttctgtgaaggagcggtttgaatttctggtgatgcaggtggagcgtattaccggattgaaagattttggaatctatctgaacaaattgctgacaattgatgcactgtttgtaaacgaagatcgtcatatgcacaatatagctgtgctgatgaatcaaaaaggtgactttgcgtattgtcctatctttgatcatggcgctggtttgctttcagacacaagcatggactatccgttgggaaccgatgtatatgatgcgctttcagaagtaagggcaaaaacaatcagcggtagttttgaggaacaattggatgtttcagaagaagtatgcagaacaaatctgtattttcattttacaaaaaaagatgtagaacgattattaaaggaaataccgggttattctgaacaggagaaaaatcgcgttcaagatattttatttgagcagatgcgtaaatataaatatctgtttaaaaattgatctcagtctgagttgagactcccacttctgcaagtggtgagtagtaacaagtatttctcagtgggagttca

SEQ ID NO: 13358 - DNA, 170 bp, Unknown
  gut microbiota DNA sequence
ccagcgttcatcctgagccaggatcaaactctcataaaaagtttttcccgtttcagaatcaactggctaattaaccattaattccaaacgttttactgttttaggttgctttgactttcgtctctgctttgttctctcgaactcatttcaatgcgaattacttcgctgtt

SEQ ID NO: 13359 - DNA, 411 bp, Unknown
  gut microbiota DNA sequence
gtgctccaagagtcctccggcaaatccgtggtgtacactctttgctgcggaatgtcctttgaatgtgcgaatgaatttctcgtctttttcaaaataatactcgatcactccacgcagatacggattgctgatctgtcttccgtaggaaagcagttcttcgtacatcccatctacgcttttttctgtcgaaggcatataatctgcaggtatgtattcgccttcctgtgcttttctgatctggcggatgttcaattgaagattgttattataactgatgacatctccgaatacttcaatgaaatctttctcatcataatcagcaattccattggaattcggatcccagacttttccgtccagagttcctgtcttatcctgaagtatcagattgtcatacggctttccattccg

SEQ ID NO: 13360 - DNA, 17445 bp, Unknown
  gut microbiota DNA sequence
aaagataaatttgggcggagccgctatgtgctggagacctttgtaaaatttggcgcaccggaggatattttatatgtggcaaaaccacatgtgggaacggatgtgcttcgaaacgtagtaacccagatgcggcaggaaatcatccggcttggtggaacctttcatttttcttccaaagtaacggatcttcgcatgaaagacggaaacgtgtgtgcgattgagatcaacggacaggaatggcatgaggtttcgcatctggtactggcgatcggacacagtgcaagagatacgtttgaaatgctttacgagcgccagatcccgatgacagcaaaatcttttgctgtcggtatgcgtgtggaacatccgcaggagatgatcaatcacagtcagtatggtacagatgcggatatgagcctgctgccaaccgcgacatataagctgacacatcaggcatcaaacggtcgtggtgtgtattctttctgtatgtgtccgggtggttttgtagttaatgcgtcatctgagccgcagcgactggcagtgaacggtatgagttatcggaagcgggacagtcacaatgcaaacagtgcgatcattgtttcggtgactccggaggattatccggatggcagtcatccattgtccggcgttgcttttcagagagacttagaggaaaaagcatggaatctggcaaaaggtaaagtgccgcagcagttattcggtgattttgagcagggaaaggtaagcacaggttatggcagttttgagagctgtgtaaaaggacagcatgattttgccaacttaagagaaatttttccggaagctttaaatgaagctttttgtgagggcatgcatgcctacggcagaaaaattgtcggttttgatcgggcagactgcattttatccggtgtggaaagccggacgtcatcaccggtgcgtattcaccggaatgagacctttcagagtgaaatccgtgggctctatccttgcggggaaggtgccggttatgcaggaggcattatgtctgctgccatggatggcttgaaagttgcggaagcgatattacagcaggagatgaaataaatggagataaatatagaagaactgactcctatgatgcaaaagtacatggagacaaagcaggaatacaaagactgtattctgttttaccgtttgggagatttctatgagatgttttttgaggatgccctgactgcatccagagaattagagattaccctgaccggaaaaagctgcggattaaaagagcgtgcgccaatgtgtggcgttccttttcatgcagtagaaggatatctgaataagctggtatccaaaggctataaagttgccatctgtgagcaggtggaagatccgaaacaggctaagggactggtaaaacgtgaagtgacacgaattgtcacaccgggcaccaatctggatacgtatgccttggatgagacaaaaaataactacattatgtgtatcgtttatgtagataacaaatacggcgtgtctgtggcggacgttacgacaggtgcttattttgtgacggaactggattctgaacgaaaacttctggatgagatcagcaaatatatgccgtctgagattatttcaaatgaagcattttttatgagtggcattgatctggcggatctgcgtcatcgtctgggcatcacgatctattctctggaatcctggtattttggagatgatctggcagcaacgacgttaaaagagcatttccatgtggcatctttggacggtcttggattaggggattataactgtggcgtgatcgctgccggttcccttttaaaatatctgtatgaaacccagaaaaccacactggatcatatgacaaccattgaaccatattctaccggaaaattcatggtgcttgacagttccacaagacgaaatctggaactggtagagacactgcgtgaaaaacagaaacgtggttccctgctctgggtattagataagacaaaaactgctatgggtgcgcgaaccctgcgttcctatctggagcagccgctgatcgataaaaaaaagatcgaagcccgactggatatggtagaagaactgaaaaataacatgatttgccgggaagaactgcgggaatacttaaatcctatctatgatctggaacgcctgatcagccgcgtggtttatcagactgccaatccaagagatctgattgcgtttcgttcctctctggaaatgctgcctgccatcaagacattattgcaggatctgagcagtccgttagtgagggaactggatgaacagttagatccgctgacagatatctgtacattgatcacagaatctattgaggatgaaccgccgatctccatccgggaaggcggcatgatcaagaccggttatgacgagcaggtggatcatctgcgtaatgcgaaaacagaaggaaaaacctggcttgccaagattgaagaagaagaacgggaaaagaccggtatcaaaaatcttcgtatcaaatataacaaagtattcggatattatttagaggtaacaaattcttacaaagatctggtgccggaatattatacacgaaaacagacactgaccaatgcagagcgttacatcacaccggagttaaaagaactggaagagaccattcttggtgcagaggacaagctgacagcgttagagtatgagattttctgcaaggtgcgtaaccagattgcagaacaggtggttcgaatccagcatacagcaaaagccattgccggtctggatgtgtttgcttctctggcactggttgcggagcagaataattatgtgcgtccgaagatgaatgaaaaaggaattttggagatcaagagcggacgtcatccggtggtggaaaaaatgatcaccaacgatatgtttattgaaaatgatacctatctggataataaaaataaccggattgccattatcaccggaccgaacatggcaggaaaatccacctatatgcgacagaatgccctgatcgttctgatggcgcaggtcggaagctttgtcccggcacagagtgccaatatcggtatcgtggatcgtatttttacccgtgtgggtgcatcggatgatctggcttccggacagagtacgttcatggtagagatgaatgaggttgccaatattttacggaatgccaccagcagcagtctgctgatcctagatgagatcggacgtggaacaagtaccattgacggactttccattgcgtgggcagtcgttgaatatattagtaatccgaagattttgggtgcaaagactttgttcgcaacacattatcacgaactgacagaactggaaggaaaactttccaatgtcaataattattgtatcgcggtcaaggaaaaaggcgatgatatcgtatttttgcgaaagatcgtatccggtggagcagaccgaagctatggtattcaggtcgctaagctggcaggcgttccggatccggtcatcgagcgggcaaaagtcatctgtgaggagttagagcgggcaaatatgagcaatctggcagcaaatctgccggaaatcccgtcacagcataaggcaaaaaccaaaaagccggatgatgtggatctggcacagatgtccttgtttgatacggttaaggacgatgatattattgaggagatccgtgagatcgacctgaccaatatgacaccatttgaagcgatgagcaaattgtatgaaatccagaataagattaaaaatcgctggtaggaggcacgtatgccacagatagaagtattagatgaacagaccatagataaaattgcggcgggagaggtggtagagcgcccttcttccgtagttaaagagcttgtggaaaatgccattgatgcgaaagcatcggcagtgacggtggagatcaaagatggtggaacgtcactgatccgtatcacggataacggatgtggtattgatgcggcacagattcccattgcattttaccgtcattccaccagcaagatccgtaaagtggaagaccttgtaacgatttcctctctgggattccgtggtgaggcactttccagtattgcggcggttgcacaggtggaactgatcaccaagacaccggagcagtttaccggaagccgttatctgatcgaaggcggtaaagagatttctttagaggagatcggagcaccgaacggaacgacgtttctggtaaaaaatctgttttacaatactccggtgcgccggaaatttttgaaatccaatcagacagaggcaggctatgtcaatgatctgatggagcgaatagcactttcccatccggatgtgtccttcaaatttatcaacaacgggcagattcgtctgcatacttccggaaacggacagttaaaggatattatttatcatatttatggcagagatatcgctgccaatttattggaagttcaggcagattatccgggattttccgtggaaggctatatcggaaaaccgatcattgccagaggaaaccgaaattttgaaagttattttattaacggacgttatatcaagagtagtctgatcgcgaaatccttagaggatggctaccgcggttttatgatgcagcataaatatccgtttacggtactgaccatttcactggatggtacgctggtggacgtgaatgtccatccaaacaaaatggaaatgcgtttttccaatggggaagaaatgtatcatcagctggttgcactgatttcggagcgcctgcgagagagtgaactgattccgaaagtggcagtaaaggaagaacgaaaagaagaaaagcgtccggttcaggcggcaggtgcggttccggaaccatttgagacgaaacgtctggaaaaactgcgggctaccattgcaaaagacagtccttatgagcgtaaatatccggagcgggagcgaaagatcccggtatcggtaaatacacaaaatactcagaatcaggcagagggcttaaaagaggaacctggagtaaaaacaggagaatctgttggagcagaaaaaaacgcaaacgtgaatcttccagaaaatgagaagaatattgctgcgaatattgcaggaaaagacgatactgttactatcgaacagaaagttccagtaactggaatgggcaaaatgcaacaggtagcagtagcaacagaaaatttacagcagaaagatacattaactgctgaaacgggaacagtggaagtcggcaatggatctgtttacacagaaaaaacggattctgttgtttatgaaacaaaaacacaggagccagttatggaacaggcagtgcagcagacattatatgatctggcagaacagcgtgaacacagtgatgcggtacgggaagattctgtacatgaggagttgaaattgctttccaaagaagcacgtccacagcatcggatcatcggacaactgtttgacacgtattggctggtggagtttcaggatcagttttatatgatcgatcagcatgccgcacatgaaaaagtgctgtttgagcagaccatgaaggcataccacagcaaagaatttacgtctcagatggtaagcccgccgatcattttatccctgacgatgcaggaagaaattttattaaagaaatttttaccggaatttacgaaactgggatatgagatttcgccgtttggcggaaaggaatatgcggtaacggcagttccgggcaatctgtatgggttaaatggacagagtctgctgttggaactgatggacagcttaagttccatgtcggtgaaagatacgccggaattggtagtagaaaaaattgcaagtatgtcctgcaaagctgccgttaaaggcaatcagaagttatccagaccggagatcgaacatctgatcgatgaactactgacactggataatccttatttttgcccgcatggacgaccggttatcgttgccatgaataaatatgagatagaaaagaaatttaagcgtattgtttaaaggaagatagatagatgaagacagaaaaacaaccattattaattttaaccggaccgactgctgtcggaaaaacagatctgtccattgcactggcaaaaagaattaacggtgccgtgatctccgcagattccatgcaggtatatcgcgggatggatattggttctgccaaggtcatgccggaggaaatgcagggcgtagaccattatctgatcgatgtgctggatccggaggatgaatttcatgtggttcgttttcaggagatggcaaaagctgccttaaaagagatctatgcgaaagggcagattccgatcgtggcaggcggaaccggattttacattcaggcgctgctgtacgatattgattttacggaacaggaggaagataccgcacttcgggagcattatgcgcagatcgcaaaagagcagggaaatgaagtgctgcatgagatgctgaaaaaagtagatccggcttcggcagcgatcattcatgcaaataatgtgaaacgtacgatccgggcactggaatattttgaaaaaaccggagaaccgatctccaaacacaatgagcaggagcgggcgaaagaatcgccgtatgatttccgttattttgtgttgaacgatgatcgagcacatttatatgaacggatcgaccgcagggtagatctgatgctggagcacggactggtggaggaagtaaaacggctgcgtgcaaaggggtatcacaaaggcatggtatccatgcagggacttggctacaaggagattctttcctggctggatggagagatcagctatgaggaagccatttatttactgaaacgggataccagacattttgcaaaacgccagcttacgtggtttcgccgggagcgggatgtgatctggctgaataaaccggactatgattatgacgattccaaaatattggaagcgattttaaatgagataaaagctggaggatggctatgacagaagaattaattgagaataagtatattgagatgggaatttccaaagaggtttatgaatttggaaaagaaatcgaacagggattaaaagaacgttttgaccgtatcgatcagacgacagaatataatcagatgaaagtcattgatgcgatgcagaaatgcagagtcagtgcagagtgttttcaggcaaccagcggatacggctacaatgatattggacgtgatacgctggaagaagtatatgcggagtgttttcatggagaagctgcgctggtacgcccacagatcacctgtggtacccatgcgcttgcactggcactgatgtctaatcttcgtccgggcgacgagctgctttcaccggttggtaaaccttatgataccttagaggaagttatcggaatccgcccgtccaaaggttcactggcagagtatggcattacttatcgccaggtagatctgttaaacaaccgggattttgattttgagggcattcgtgctgcaatcaatgaacgcacaaaactggtaaccattcagcgttccaaaggatatgagacacgtccgacactttccattgcacggatcaaagaactgatctcctttgtaaaatctatcaaaccggatgtgatctgtatggtagataactgttacggagaatttgtagaggagcaggagccattggaagttggcgctgacatgatcgttggttccctgatcaaaaatcttggcggcggtctggcaccgatcggcggctatattgttggtaaaaaggagtgcgtggacaatgcggcttatcgtctgacttctccgggacttggaaaagaagtcggagcttctttaggtgtgatccagagcttttatcagggactgtttcaggcaccgaccgttgtgtccggcgcattaaaaggagcaatctttgcggcaaatatttttgaaaaaatcggatttccggtcatcccaaacagcaccgaatcccgccacgatatcattcaggcagtaacatttggctgcccggaaggtgtgatcgcattctgtcagggcattcaggcagcagcaccggtggattcctatgtaacaccggagccttgggatatgccgggctatgacagtcaggtcatcatggcagcaggcgcttttgtacagggttcttccattgaactgagtgcggacggtccgatcaaaccgccgtatgcggtatattttcagggcggactgacctggtatcatgcaaaacttggcatcctgatggcattacagaaactgatggatgcaggaattgtgacaaaagattttacagctgcaaatgtgaaagatctgtaaggcgttcttcataaaaatttaagagaaatgcaaaaaaatgttctcatttttccggtatacacgaaaaaaaaaatatgctatgattatacagactgcatagagagagtagaaaagagaattttatgcagaaaaatatgacagtaaaagagttaccggatcaggaacgaccgtatgaaaaatgtctggcgtatggagccggcgcactgtccgatgcagagctgatcagcgtgatcatccgcaccggaagtcagggggaacgaagcatcgatctggcaaaccgcattttaaatgcgggaccggacggactgctgaaccttttgcgcctggacgtggaacgtctgacacagatccgtggaattggaaatgtcaaagcaattcagttaaaatgtatcggtgagctggcaaagcgtattgcatcgacaagccgccgggaacagatcactctgcagtctgccaggagcattgcagagtattttatggaacagctaagacatgaaccgcaggagcatctgatgctggcaatgtttgataacaaaagcatgctgatcggagaaaagcttctgtccaccgggacgagtaatgcggcactgatctctgccagggatatttaccggacagcgctgcagtatcaggcagcgtacgttgtggtgttacataatcatcccagtggcaatccggaaccaagccgggaagatattctggtgacccgaaagataaaagcgtgtggcgaattactggatattttacttatggaccatatcattatcggagataaccgatatttcagctttcgtgagcaggatattctatttgagaaagggagagactaatggcaaacatatacggaattgaccttggaacctgtaatctgaagattttcagcaaacacagcaacaagatcatcaaagagaaaaatacaattgcgatcatcaacaaaaatcagttatatgcatatggaaatgaagcatatgcaatgtatgaaaaagcaccggagaatatcaacgtatcatttccaatcaccggcggtgtgatcgcagattacaataatatgcaggtaatggtacaggaagtactggagaaaaatgtcaagggacacgtaaaaggctctgaatttatcattgctgtcccaactgatattacagaagtagagaagaaagcattttatgatctgttttacaaaagcaaaatgaaaccgaaatctgttcttctctgtgataaacccatcgcagatgccgtaggtcttggactggatgtcaatgagccgaccggtatcatggtcgtagatatcggagcagataccacagagatctcagtgatctcccttggcggactggttttaagtgatctgcttcattttggcggcaaccgtctggatgagtcgatcattacgcatatcaagaaaaactacaatctggtcatcggacagaaaactgccatgcagttaaaagagcacatcggcagcgcacttccgggtgaggaaggaatttataccattgtaggactggatgtagtcagcggtcttccgattgaaatggagattactgcagatactgtatatgaggcgatgaaagacaacctcagttctatctgcaatgcaatcaagatgattctggagaagactccgccagaacttgcaaaagatatcatccattccggtatttatctgaccggtggtggttccaatatcaaagatatggataaactgtttacacagattaccaatatcaaggtaaatacctgtgaggagccggatgagaccgttgtccagggcttaagtcttgttgtgacaaatgacaagttcaaacgtctggcttacagcatgcgtacaagaatttttaaataacagaggcatagtatgaggagaaagaaaaaaagtaaatttccagcaaaatatgtgctgcttattatgactttactctgcgctgtgatcatcggatgcagtttgaaagcatccgaaaccggtccggtatcaacggcagccggttctgtgatcgctccgatgcagaaaggtgtaaacaaactgggaagcgcgctgacgaatgtcagaaatcatctgcagtccaagaaaagtctggagactgagaatgagcaattgcgcgaacagcttgcagatgcacaggcaagtctgaatcaggttcagttaaatcaggaagaactggacaatctgaaaaaattgtatcagatggatcagacctatgcagactatgagaaagttgcggcaaatgtgatcggaaaagatgcaggaaactggttttctgtattcctgatcgaccgtggaagcaacgacggtatttccgttggaatgaatgtactggcagacggaggacttgccggtattgtcacacaggtgggaccaaattatgcaaaagtccgttccatcattgatgacaacagcaatgtcagtgcaaagaatctttccacttccgatctgtgtattgtaagtggaagtttaaaatcaatgaacgaatccagtcagattgattttgatgatctcagagacaaagatgggcaggcaaaagttggggatcagattgtcacatcaaatatcagtgatatgtttctggaggggattccgatcggatacattacggatatccagacagattccaataatctgaccaagtccggacacattgcaacgatcgtggattttgaacatctcagcgacgtgtttgttattttacagacaaaagacgtgacagatacgacaggtacaacagagggggagtaggttatgaggagaaaaattgttttgacaattacgatcatcgcctgcttccttttacaatgtacggtgtttaaagcactgtccattgcttcaatctccccgaatctgctgatcgttgtggtcgcatcatttggatttatgagaggaaaaaaggaaggacttttcgtaggattttttgcaggactgctgttagatatcatgtttggaactgtgattggattttatgcgctgatctacatgtatatcggatatctgaacggtttcttcaaacggatctttttcccggatgaagtgaaactgccccttgccctgatcgcattgagtgatttcttctgcaatataattattttctttacgttattctggttccgcggcagattttcctttggctattatctgcttcacacgatcctgccggaactggtctatacgatggttgtatccatcctgctttattttatcctgttgaagataaatgaaaagctggaagacattgaacgaaggagtgcagcaaaatttggttgataagataaaagaatggattgtaaaaattgtaacttccagactgtttgtgctgtgggtagtgatactggcgctgtttgcatttgtattgcagcatctgtttaccatgcagatcatcaacggtgcagcttatctgaaggattacacatacagcattcagaaaacaattgagatagagggaacacgcggtaatatttatgaccgaaacggtgtccttctggcacacaacgaattatcttataccgtaacactggaagataatggtacttatgcaaataacaaagagcgtgcaaagcttttgaatgaggagatcagtacgcttattgaaatgattgaaaaaaacggtgacagcatcgtcaatgatctggatctgtatatggatccgagcggggaactgtcttttaatgtagacggcacagaacttgacggtttccgccgtgatgtttatggcaggaaaaaagtttcagacctgaaattcaatgcaaaattaggttatgatgagtcaacggcaacaccggagcagatgtacgagtatctggtgaataagtttgcggtagatacagaaacttacgaccggtatcgggcatatcagatcatggtagttcgatatgcgatgtatctgacttctttccagaaatatatcccgaccaacattgcggaggatgtatcagatgagaccgttgcgatcatccgggaacatgcttcggatctgcagggtgtagaagtgaaggaagatacgaaacgtgtgtatgattatccggaatatttctcccatattcttggttataccggaaaaatttctgattctgaatacgacgatctctctgcacaggatgattcctacagcaagagtgatatcattggtaaagcgggaatcgaacaggttatggagttacagcttcagggaaagaaaggtgccgagaccgtttatgtcaacaatcttggtaaagtattacaggtaaaagattacaaggattcttctgcaggaaataacgtatatctgtctattgatgcaacgctgcagatggcagtatatgatctgttggaacaggaacttgcgggtatccttaactccaaaatcgtaaatgcgaaaaccagtgaaagttcagaattatatattccgatttataaagtatacaatgcattgatcgaaaacagtgtaattgacacgtctgccatggcagacgcggcagagggaaccacacaggcatctgtatatcagacatttacaaaccgaaagacagaggcgctgacagatgtggcgaatacgctgcagtcagatactgcctatgaggatctttccgacgaaatgcaggagatggtgacctatgtagtaaaaatgctgcaggataaatctgtgttcctgacttctgccattgacagttcggattctgtatacaaagattggaaggacggcaagatttctgtacaggaatatctgcgtcatgccattgattcttcctggatcaatattacagagtttgatctgaatgagaaatatgcagatacggatgaagtatatcagcagctgatctcttatgtgacggataaatttcagaatgataaggctttcgacaaaattgtctataaatatttgatctataatgataagatttccggaagccagttatgtctgatcctgtatgaacagggaattctggtacaggacgatgagagcatggcatctctgaaaaatggttccaccagcgcttatacgtttctgaaaaacaaaattcagaacatggagatcacaccggcacaattagccttggatccttgtaccggatcctgtgtgatcatggatccgaataccggagaattgctggcgagtgtaagttatccggggtatgataacaaccggctggcaaattccatggattctgcttactataacgcactgcttcaggatggttctctgccgctgtataataatgcaacacagcagaccacagcgcccggttctaccttcaagatggttactgcatctgccggtctgaccgaaggtgctatcagtaccggaacagtgattacagataccggtgtctttgaccgactgggattaactctgaaatgttgggtatatccaagcaaccatggaagcattacagtttcacaggcgattcgtgattcatgtaactatttctttgcagagacagcttaccgtttaagtctgaatggagacacgtataatgaagataaaggattaagcgcgattgcgaaatatgcaacagaatttggccttgcggataagacaaatattgagattccggaaggtacaccaaagattgcagatgaattcccgattgatgcatccatcggacagagtaatcacagctatacgacttcacagcttgcccgctatgtttcttctattgcaaatgaaggtaccgtatatgatctgacactgttaaataaagtgacagattctgatggaaatgtattacagacctatacgccggaagtacacaaccagatcacagacctttctgcatctacctgggaagtactgcacagcggaatggagatggcaatcggtgaacacgatcagtttaaggatcttcaggtgaaactggcaggtaaaaccggtactgcacaggaagatgagaaacgtccaaaccatgcgttgtttgtcggctatgctccggcagatgctccgcagattgcgattgcaacacgtattgcttatggatatggttccagcaatgcatgtgtatttgtagatcaggttatgaagtactatttcaaacaaaatacggaagaagaacttctgaatggaaaagcaaccaacgtagggacatcttcgaacagctttggcgattagaaaatcaaaggtgagagaagccgatgaaaaatcacattacaaaagataacagacaaataacaggaagggatcttttgtatgtgtgaaattattgttgttacttcaggaaaaggtggcgtaggaaagacaacaactactgcgaatcttggcgcagggcttgcgatgatgcgaaaaaaggtgctgatgatcgatacggatatcggacttcgcaatctggatgttgtgatgggattggaacaccggattttgtataatctggtggatatcgtagaaggaaactgccggatccgtcaggcagtgatccgggatcgtcagtttccgggactgtatctgatcccggcggcacagaccagagataaatcagcggtgacgccggagcagatgatcaaggtggtcaatgaattgcgggatgactttgattacattctgctggacagtccggcaggcattgaacagggatttcaggtggcgatcgccggagcggaccgcgcccttgtggtcacgacaccggagatttccgctgttcgggatgcggatcgcgtcattggattattgttttccgctgagatcaatgacattaaattaattgtgaaccgtatccgcccggatatgatccggcagggacagatgctgaatctgaaggatatttcagatattttatgtgtggatgtgatcggtgcaatctgtgatgatgagcaggtcgtgatctccacaaataatggaacaccactgaccggaattggtaccgtggcaggggaagcttatctgaatattgtcagacgactgcttggggaagacgttccattgccaagatttgcagttccaaaaaccggaaagcgcagacaccacaggaaatggaaacgaaaatacataacaggataaaataaatcggaggaattttatgtttaagcaatacaaattaaaaaactacagatttcggctggtagcatatgtggtgctgctgtgcattatcggtgttatggtggtgggcagtgcgaaaccgtcggttcagaacaaacagatcatcggtattgccggtggtctggtagtcatggtgatcgtttcactgattgattacggtacgatcctgaaattccgacgtcccatatatctgctggcagttgtattgcttgccgtgatatttattccgggcgtcggtgataataccggtggtgcaacccgatggattcaggttacttccagttttaagtttcagccgtccgagttttgcaaaatcctgctgatcatcttttttgcaggattttttatgaaatataaggatcagttgaatacctggaagacaatattgctcagtctgatccttgcgggtattccgctggcattgatcgtgaaagaaccggatctgtcaacgaccattgcaacaacaatgattttcattatcctcttgtttgttgcaggattaagttataaaatagtagcaggagtgctggcacttggtgttccggtaggaatcataggcgtggtactgatcatgaaacaggcactgcctttaaaaccatatcagtacaaacgaatcatgtcctggctgcagccgtcgaacccggcatatgcggacgattcttaccagcagcaaaattcgatcatagcgattggatccggacagctctggggaaaaggattgaacaacagttccatcacttccctgaaaaacggtgattttatctctgagccgcagacggatttcatctttgcggttatcggagaagaacttggatttatcggctgtctggtcgtcattatcttattgcttttgattgtttttgagtgtatactaattgcaaaaaatgcgaaggatcttggcggcagactgatctgttgtggtatggcagcgctgatcggctttcagagctttatcaatatctgtgtaacaacaggattgatgccgaataccggattgccacttccttttgtcagttatggactgacgtcgattatgagtttgtttattggtctggggatggtactaaatgtaggtcttcaggctagaaaatatcacggattgggggacatagactaatgaacatagggttgatcgcacacgactcaaagaaaaaattaatgcagaatttttgtattgcataccgggggattttgggaagaaattcgctgtatgcaaccggaacaaccggcagactggtagaggaagctaccaacctgtctgtacacaaatatctgaccggacagcttggtggttcccagcagcttggcgctgatatcgaaaataactacattgaccttgttattttcttacgtgatccactgacaccaaaatcacacgaaccggatgtagacaatattgtccgtctgtgtgatacacataacattccgctggcaacaaatctggctacagcagaattgttaatccattctttagacagaggagatcttgactggcgtgaaatgtacaaataaaataaaagtaatgattccgttgcttggagtctgcctgttactgggcggatgccaggagcgaaccgatgtggcagatgcgtatgatgtctatgccacatctgatacttatcaactgacagagagcagcacagagaaatccatttccttgctgggacaggatctgtgcgttggcggcacagaaaacactgccgcagcagatggcattgatacggattatgcacagagtgcagcggtcttttccgttcaggatgaagaaattacctatgcacagaatatttatcagagaatgtatcctgccagcacgacaaagatcctgactgcataccttgcattaaaatatggcaatctggatgatgtactgacggtttcttccgatgcggtcaatacactgatgtccggatcctccatctgtggattaaagccgggagatcagctgacgctggatcaggctttgtatggtctgatgctttgcagtggaaatgatgcggcaaatgttattgcagaatatatttccggaagtaccgataaatttgcagaactgatgaacaaagaagcacaggcgttgggtgcaacacagtcccattttgtgaatccgcatggtttaccagatgataaccactatacgactgcttatgatttgtatctgatttttaacgcagccattaaggatgaccggtttgtgaattatatttccacaaaaaa

SEQ ID NO: 13361 - DNA, 15814 bp, Unknown
  gut microbiota DNA sequence
tatctgaaaggcacttatgatatgccggaaaatgtcactgtgatcggtggtaagacaggaacgacagaagcagcaggaagctgtttggttctgtacagtgaaagtcaggataagaagccatatatttctattgtattgaaaggcaattccaaaaaggagctttatacgctgatgacggaactgctcacaaattattcaaactaaagccactgaaaattcaaatttaacagttgtattttaggtatggatataatataatgaatacataaacagttacttctttttacgatacaaatgacgcatataccgtgtgtgaaatggaagaagtgacagaggtaggaggataaaattatggttgaaattattgccggcaaaaaaggaaagggtaagacaaaatatttattggacaaggtaaatgcagcagtggaaggcgcttccggtaatatcgtatatttggataaaagtcagaaacacatgcatgagttatcaaacaaagttcgtttgatcaacgttgcagattatccaatcagcaactgtgatgagttccttggatttatctgtggtatcgtttcacaggattatgatttacaggagatgtatcttgacagtttccttacaattgcaaaccttgctgatgatcagatcgtacatgcaattgagaagcttgatgttatcagtgaaaagttcaacgtaaaattcgttttaagcgtttcaaaggacgaagcagatctgcctgagtgtgcaaaagccagactgattgtttctttataagaatcgatttatcaggtgtcttaagggggaatccttaagacacctttttacttgacaggaaatcgtagattttttctgtatttatttttatgcttcctcatcaccgatggatcggatacgaccaaaaacgctgatgagataaagtccactgattcccacaagcgcatatatgatgcgtgaaatccagctcatgttgccaaaaataaaggcaatcaggtcgaatcggaaaaatccgatcaggccccagtttacagcaccgacaatgacaagtgccagcaggacattatccagacattttgtgttcatagcacttcctccttctggaacaagtattgccggtatgggcaatttttatgcgtgataacgcatattttttgaaaaataacgttgaaaggaagaccgaaatgaagaaaaagaagcggaaaatagtacgttatcgcagacgctttcatctgaatatcggcattattatatttttatttgtatttatctattttgtgatctatctgatttcctatctgacacagaataatatttctgcctatgaggtacagtatggtcagatcgcacgaaacagaacgtatactggattgattctccgtccggagcaggtattctacagtcagaataccggagatattaattattataaaaaagaaggagacaaagcaggatacaatgacctgatctgttccgttgataagaccggaaacatttcctctgagatttcccaggcaggactggatgcaacgaacctgtcaaatgatgaattgttaaagattcagaattccatcacgaattatgtttcctcttattctaatatgcagttttataatgtgtattctttcaagggaaatgtgaatgcacagattcaggagaacctgtatatcaatgcattgaacgatctgtccgaccagacggattctgcagtttcacagaatacattttcttttgagcggacgtctgtagatggtatccttgccttgtataccgatggttacgaggatgttacagcagattcctttactgcggatatgtacaatccggcatcttatacgaagacgaatctgaagggcaatacgcagatcacatcgggacaggctatgtacaagatcgctaccagtgagaactggtcgatcatggttccggttacggatgaggaagcagcgcgttaccaggaagaaatcggagaaaattcggattctttcgttttgcatgtgaaattccggaaagatgatacggagacaaatgcaacgacttatattaagaatctggatgggcagaaatttttacagttgaatctgaacaattccatggtacgctttgtgtcagaccgttatatagaagtggaacttggttcggataagaacaccggtctgaagataccaaattctgcgatcgtagaaaaagagtttctggtcgtaccgaaaaagtatgtcggaaaaggggataactcctccagtgacggtgtgatcaagatcacaaaggataaacgcggaaaagaatccgcggaatttgtatcgatcaatgcgtacgcggaaacagacgacagttattatgtatcacaggataatctgtctgtgggtgatacgatccagatgccggacagcagcgaacagtattcgctgaaagatacggcaaagcgaaaaggtgtttacaatatggataaaggatatgcgatcttcagacagattgaggtcatatccgacaatgaggaatattccgttgtgcagagtggaacaaaatttggtatttctctgtatgaccatattgcattgaacggcagtgaagtacaggaaggcgatttcctgaattagccatagtttgtgataaagttatttgataataatcaggagggaaaaatagatgatctgtgaaaatttaaaagaagtagaagccaaaattgaagcagcctgcaaaagagccggacgtgaccgctcagaagtaacactgatcgcagtcagcaagacaaaaccggttgaaatgttagaggaagcatatggaatcggtatccgggaatttggtgagaataaagtacaggaaatgatggataaatacgaagtgatgccaaaagacattcactggcacatgatcggacacttgcagcggaacaaagtaaaatacctgatgggaaaagctgccctgatccattccgtggattccttgagacttgcagaggagatcagtgcacagtctgtcaaacatgaggtgacgacagacattctgatcgaggtcaatattgccggagaagagacaaaatttggtacagacagagaggaagcaatcgcgttggtagaagctgctgcaaaacttccgaatatccacatctgtggtttgatgacgattgcgccgtttgtagaaaattcggaagataaccgcaaatattttcagcaaatccgtcaattatctgttgacatcaaagaaaaaaacattgataatgtagacatgcgtattttgtccatgggtatgaccggagactatgaagtagccattgaagagggcgctactatggtaagagtcggaaccggcatctttggtgcgcgtaattataatatataaaagacgtagataggagattttatcaatatgggtatgatggataaatttttaaatataatgcgtttgaatgcagacgaagaagaagatttttacgatgatgactattatgatgatgacgatgatgatgattactatgaggagccaaagcgcaaatcattccgtcgtgagaaagcacagccggaagaagatcctgcgatcaaattctctgctgcaaaagaacagaaagcatctgcaaaatctaattccaaggttacgccgatgcgtccatcaaaaaagaatcagggaggaaatgctgctatggaagtatgtgtgatcaaacctacatctgtggaggatgcccgcgaaattactgagacattattacgtaaccgtacggttgttttgaatctggaaggaatcgatctggagattggacagagaatcattgattttacctctggttcctgtttcgcgatcgatggaaatttacagaagatttccaattacatatttattgtaagcccgtcttctgttgacatttcaggagatttccagagtattatggatgcatttgatgcatcttctttacagacagatatttaattcgatagctggtgaaatctatcgagcaaagagccagtcgcatatgcgtactggttcttcttttgtagaaaatgcgaggaacgaattgctttgcaaaagtaagtatcgcatttttgactttacagaaacttagaatgataagttcctgaatcataatggaaatacaggggggaacatgtgatgtccgatacgacaaaatctgccgtaagcagaggaaaaagtgtgattttcgcagtgatcagctttgcgattttagtcgcagccgatcagatcaccaaatggatggcagtgctgcatctgaaaaatcagcctgcaaaagtacttattaacaacgtatttgagttatattatctggaaaaccgtggtgcagcctttggaatttttcagggaaaacgatttgcttttctgattattaccgtagtgattttactggttctggcatattgtttctggaatattccatataccgcaaaatatacgtctttgcgctgtatcatcgttttgatcggagccggagcagtcggcaattttatcgaccgtatgagtaatggatatgttgtggatttcttttattttaaactgatcaattttccggtatttaacgtggcagatatttatgtgacattgtcagctgttttcctggcgatcctgctactgtttaaatacaaagaagaagatctgaatgttctggtgaacagtttaaaaaagagtagaaaaggataatgcgtacatgagtgatgcgatgttagaagaatataccgtggaggaaagccagtccggaatgcggttggataaatttttgacagagatttatccggatcagaccagaagtttcctgcaaaagctggtaaagagcggagaaattaaagtaaatggaaagccggtgataaaagccggttttgttgtagaaggtggagaccaggtaagtgcatccattccgacaccacaggcggtagaaatcgaagcggagaacattccgttggacattctgtatgaggatgcggacgtattgatcgttaacaaaccgaagggaatggtggttcacccttctgccggacattatagtggtacgctggtaaatgccattatgtatcattgtgcagacagtctctccggaatcaacggagagatccgtccgggaatcgtacaccgaatcgatatggacacgaccggtgcactgatcatctgcaaaaacgatgcggcacatgtggatatcgcggagcagatcaaggagcataccgttacacgccgctatcgtggaattgtgtgcggtgtcgtcaaagaggacgaaggaaccatagaaggcgccattggacgtcatccgacacagcgtaaaaaaatggcaatcaatgagaaaaacggaaaacctgccattacccattataaagtgttgcagcgttttgcaaaatacacttatatggagtttcgcctggagacgggacgcactcatcagatccgtgtgcatatggcaagcatcgggcatccgcttcttggggacgaactgtatggaaatccgaaaaatcttgcgatgaagggattgcagggacagacgctgcatgctatggtgatcgggtttgtccatccgaccacccatgaatatatggaatttgaagctccgttgccggagtatttccagaacttattgaaaaaacttccaaagcagtagtgcatccatgaaaagtttagaaggattattttggaaaatttgtaggtgagcaataggaacaaatattttacaacttgtgcattggaacggtaaggagaaatcattgaattttcagacaaaacaggtttaccgttgagatttttgcaaaaatgtagtatactataaatagtaagtgaaggaaagggggatttcctatgagaaatcttgtaattgcaatcggacgtgaatttggaagcggcggaaaagaaatcggacagaaattggctgaccggttaaatataaaatgttacgacagtgaattactttctattgcagcaaaaaacagtggattctgcgaggaaattttaaagaaaaatgatgagaaaccgacaaacagctttttatattctttagtcatggatacatattccatgagtggatacacatcagccccgtttgtagatatgccattgaaccataaagtattcctggcacagtttgaagcaatcaaaaaaatagcatctgaggaatcctgtgttatcgtaggaagatgtgcagattatgcattagcaggaaatccggattgcgtcagtgtatttattcatgcagacatggattttcgtttaaagagaattaaagcagatactgataaagagttcaaggatgacaataaagttatcgattttatcaacaagacagataagaaacgtgcaaattattacaactactactccagcaagaaatggggcgattcacgcagttatgatttctgtatcgacagttccgtacttggtattgataaaacggtagatatgatcattgaatatctgaagattcgttatccggatgaaaatatcaaataatatatgaaaatgtttagaatacgctgcgtgtgacagaaacgtatttcaaaacgaaacataaagtgctttcaggtaatccataaaggaatgtgatctggaagcacttttttgataagttatcttgcatttatttgtgctgatttctccattctctgggagaaacaccgtaattattcttaaaggcccgggaaaaatgcagctgattttcatatccgacagcagaaccgatatctgcaatcgacagagaagtcagtttcagaagttctgctgccttcaccatgcggtaattcatgagaaattcctgcggagactgcccagtacttttcttgaaaatctttccaagatagctgcggttgataccacagactgctgccacattttcaatggaaatattattctgaaaattctgttcaatataattaatcgcctctttaatataatagtcactcattttgttgctggatactaattgtgtagagtgagctgattgaatcagataatccaaaaacaggtataaatgtccgatgaggtgaaatgaagattcttttggatgatgagtgatatatatcagttcttctgccagtttatcccgcagttctttattgcgcggatgatagactggtttatttttggaaaaatccgtcatacttaatgcttctgtgatccgcaatccgtcaaattctacccagatatattcccatggtacgtttgagtctgcaatgtaggtcgtgacctgtccaggaaaaatcataaatccctgtccgctgcgtatttggtaagtttgcgttactcctttcgtatcatctgccagcagagttcctgttccagtaagaatataatgaaacagatagtgattgcgggcagccggtccaaaagaatgtcctggatcacatttttcgtatccatactgatacagacacaggtcaataaaattttcatttggaaaaatatgaaataaaagatcaggcattggaaactccctccagagtattgcaactattatttaaaaagtaaaaatataccattatgtgacatacatattgattatagcacaataaaacgcataatgatataaaaaatgaaaaatgcggatattctaggtcgcattttgagatgttacaatcattttaacagaaaaaaacaagaaaggaagcagaaaatatggcgaaaaagaaactgatctgtggattgacagctcttcttctggcaggatgcggactgaccagcctgatgggatgcggaaaacaggagacagcggcaggtaagacggagattgaaattgtctcatacaaaaaagaagcagtagatacgtttaatgagattgctgaaaaatttaatgaaacgcatgatgatattcatttgaccattgactctccgaatgaagcaatgacgattttgaaaacacgttttatccgggaagattatccggatatcgttgtcatcggtggtgatatggattactccaattttttagattcggatctttttgctgatatttcagatcttgatgtgctcagcgaaacaaaatcctcctatctggatatggataaacaattggaatttatcccgcaggaggggacatacgcgttgccatatgtcgcaaacgcggcaggtatcctctacaataaggatctgtttgaggaacatggatggaaagtacctcagacatggagtgaatttatggctctttgtgaacagattcagagcgcgggcgttcagccgttatatttcggatttaaagatacatggacctgtctggctccatggaatgcgctggctgtcggcctggcggatccgcagctttgcagtgaagtaaataatggaacgacaacttttacaaaggggtatgatgaaacggcagaaaagataaaagcgctgcttggctatggagaagcaaacccgactgcttatagctataacgatgcatgtacggcatttgcccgtggtcagtctgccatgtatactatcggaagttatgcgattccacagattaaatctgttaatccggatatgaatattggtacctttacattcccggcaaatgaggacgaagcagataatgtattaaactccggcattgatgtacagttttgtgttatgaaagcctgcaaaaacaaggaggctgcctacgaggtattgcgtttcctgtatgaggacgatacaatccgcacttatctggatgagcagggtggcattgcatgtaaacagggtgatttcccactttcttctgaactggaaggggtacgctcttatattgaatccgaccgtatggctgactttcaggatcatcactatccgagtgagatgagtgtggatgccatgattcaaacgtatctgctggatgacagcgcagatgccaaaaaaactttcctgaacaaatttgacaaagactggaagcgatacaatcgggatctgatctggaaagtgcagcaatataatgaaaaagaaggaacatcggaggatacgaaatgaaatcaaaaatgacaaatcggaataaaacattctggatcatcgcaattctggtcattgcattgttttttacattcaatacccttccgatgatcaaaggtgtgatttatagttttaccaattataaaggctatggttcttatgacgtggttggatggcgcaactatgtggatctgtttaccgatgcgagagtcggaaaaagttacctgtttacttttaaatatgccatcgccggaacaatccttgtcaatgtattaagtttgcttctggcacttggattaaacagcaatatcaaaggcaagagcgcgctgcgtggtatttactttgtaccgaatatccttggaggactggtggtcggctatattttcagctttatctttacatacattcttcctgccatcggaagcgcctgccacatctctttcctggaaaacagtattctcgccagcgaaaaatatgcatggattgcggtactgatcgtgggtgtatggcaggccgtggccatgaataccatcatttatatttcgggattacagactgttccggaagatgtctatgaagcaagtatgttggatggggccaataaatggacagaattttggaaaatcacatttccactgatcatgccgtttgtatccatcaatctggtgctcagcacaaagaacttcctgatggtatttgatcagatcgtatccctgacccagggtggccctgcgcagagtaccgagtcgatttcttatctgatctacaaaaatggtatgtccggcggacagttcggatttcagagtgcaaatgcggttttatttttcatcgtgatcgtggcaatctctgttttccagctacggtttaccaataagaaggaggaacagttataatggaaaaaggacataaaacaaataaagttttaacggtacttctgatcatcggaacgataacagtattttttccgttgtatatggcagtaatcattgcttttaagaaaccaagtgagatgacaaatgatgtagctggggcactggcactgccgaaaaactggagtttttccaattttacagaagcaatgcaggtgacagatttctggcattctcttggaaacagtttacttattacgcttgtgacaatagtattggcaattttgatccattcgattgccggatatgtgatcggacgcggtatgcgcaggatcaaaggatttaaatttatttatttttatattgtcagtggtatgtttgtaccattttcaattctgatgatgccgctggtaaagcagactgcgcagatgggaatcggaaaccgctttggtgttatcctgctgtatctggtattttatatgccaatgaatgtgcttctatacagcggatatctgaaaaatattccggaagcactggaagaagcggcaaatattgacggagccaatgcctggacaacgtactggcgaatcatttttccgatgatgaagccgatgcatgctacggttgcaatcctgaccgcacttggtacctggaatgatgtaatgacaccactggtcatcatgtccggaacaggtcagaatacgttgccgctggcgcagttaaatttccagagccagtttggaaccaattataaccttgcttttgcttcatacattctggctttgatcccgattttgattttctatgttatttgtcagaagcagatattaaatggtgtggcaaacggtgcggtaaaatagtataataaaaagcaagcaagattcagattcagtgaattataagttatgtgtaaatgactgacaaatagaaaaagcgtgaataatgaggaggaaccgtgaatggcaattatttttgatgcaaaccgaaaaatatttacaattcatacaaaacatacaacttatcagatgcaagcggatgcaaaaggttatctgctgcacttatattatggagtgcgggtaaaaggaacgatggattacctgttatgctatgcggaccatggtttctccggaaatccgtatgcagcaggtatggaccgtacttattctctggatgcactgccacaggaatatccgtcacttggaaccggtgactgtcgtaacattgcgttgaatattacgagtgcagtcggaacagagtgctgtgatccaatttttaacagttataagattacaaaaggaaaatatagcctgcagggacttccggctgtttgggcggccgatgacgaagctgaaacgctggaaatcgtgttaaaagatgatctgacacaggtagaaatacatttgctttacggtgtactggaagatgcggatatcattaccagaagtgtagtgatcaaaaatacaggaacagaaacgattaccgtgaaaaaagcattgtccgcatgccttgattttgtacagggagactacgatgcaatcagtttttatggcagacatgccatggagcgcaatctggaacgtgttcctgtgggacatggaacgtaccggattggcagtcgccgtggcagttccagtcatcagtataatcctggtgtgatccttgcagatcgtacagcaacggaagaagtcggaaactgctacggaatgctttttatgtacagtggaaattttgtctgcgaggccgagcgtgatcagtttaaccagacacgtttccagatgggactgagcgatgaactgtttgcttatcctgtggcagcaggtgcagaatttacgactccggaagtgatcatgacatattcggatcagggatttgcaaaactgtcccgccagtatcataactgcattttaaatcatgtatgcaagggcagacaggtacatacaaatcgcccaatcctgatcaacagctgggaagccgcctactttgattttgatggtgatacgatcgtggatctggcaaagcaggcagcagaacttggcattgatatggttgtcatggatgacggctggtttggtaaacgaaatgacgataattcttctctgggtgactggtttgtcaatgaaaaaaaattaggtggtacgttaggacagctgattgaacgtgtcaatgcgcagggcgtgaaatttggtatctggatcgagcctgagatggtaaatgaagacagtgatctgtaccgggagcatccggactgggcattgacgattccgggacggatgccgatccgctccagaaatcagttattacttgatttttccagaaaagaagtgcgggaagaaattttaaaacgcatctgtgcgattttagatcagggaaatatcgaatatatcaagtgggatatgaatcgaagtatggctgatgtatacgccggaaatgtaccatatgattatgttttgggactttatgattttcttgaaaagctgaccagtcgttatccggagattctgattgaaggctgcagtggcggtggcggacgttttgatgcaggtatgatgtactacactccacaaatctggtgtagtgacaataccgatgctatcaatcgaacacgcatccaatatggtacttctttcttctatccaaccgcagtagttggctcccatgtgtctgcggtaccgaatcatcagaccggcagaatcacaagtctgaataccagaggtgtggtagctatggcaggtactttcggatatgaaatgaatcctgctttactcagcagtgaagaaaaagaggaaatccgtacacagcttgcaacttatcgcagacatcaggaactgatccgtgagggtgattattatcgcctgtctgatccctttaaagaggatgtggctgcttggatgagtgttgcaaaggaccagtcacaggcattggtcagcgttgttcgtctgtctgcagagggcaatccgtttggaacctatgtgaaattaaaaggactggatgcggaatgtttttatctggaagaaaccaccggaaaggtatacagtggcatggcattaatgcaggcaggtattttacttccaatggcggcaatcgaatatgaagcatatcagttctctttcaaaaaaatgcaggaggcggctgcgttgtatgaccttctgcgggaaaaaatcggagcagaacggaaagtgatcagtatttttggcggttccggttccggaaagacgaccatggcagaaattttgcagcagcagtttctggcagacggcattggttgttttattgtgcatggggatgattatccgcacagaatcccaaaatgtaacgatcaggagcgggagctgatttatcagaaatccggagaaacaggacttaatgcgtaccttggaactccacaggaaattgaatacgaccggatcaatcaggtgcttgcaaagtttcatgtcggtgatacagagattgaactgaaaaaaatgggcagggaagatgatgaaatctggtatgaacagacggatctgaccggtgtacaggtattacttctggaatggacgcatggtgggagtgagtatctgaacggtgttgatgtttctgtctatcttgacagcacgccggaggagacaaaggcgcgcagaatccggcgtggacgggatgaaaatgcagccagtgcctttattcaactggtcttatctctggaagcgcaaaaattagagcagcaggcaaaacaggcagaccttattgtgggaaaggatggtcgtgtatatgaatcttaaaccgatgctgaatgcttatcctgacagtttaggcggaacgctgggagatattgtaacactgctgggacggaaggaactgaaagagttatttggatctttttacattttgccaagcctgtatcattcagatttagatcgtggattttctgtcattgattatgatatcaatgaggaactggccacacaggatgacctgaaacggttaaaacagcttggtattgatctgaaacttgattttatcctgaatcatgcatctgcacagtctccacagttcaaagacctggtagaaaaaggaaatgcgtcagagtataagaatttttttattgactggaatgcgttctgggaagggtatggatctatgacggaggacgggtatattcagccggatgaaatatacatcaaagacatgtttttccgcaaaccgggacttccaatcctgatggtacggtttcctgatggtacgaaacgtccgtattggaatacattttatcaggaggagcactatccacagtatctgggacagatggatctgaatatccagtcaccgaaggtatgggcgttttatcgggaaacacttgccaaaattgcgtcctatggagcaggtattgtgcgtttggatgcttttgcctatgcaccaaaggctccgggaaggaaaaattttctgaatgagccggagacatgggagttgctggagcagatcagaatgtatgctgaaccgtatgatctggcactgcttccggagattcatgctgcatatgaggaacatatttatcagacgatagcagaaaaaggatatatgacctatgatttctttttaccgggactggtaattgatgccattgaaaacaaacgcagcaggtatctggcagaatgggcgcaggaactgattgacaaaaagatccaaacggtaaacatgctaggctgtcacgatggtattccgatgctggatctgcaaggacttcttccggaagaagatattcagaaactgatcacgctgatcgtagaccgtgggggcatggtgaaaaacctgcatggtcagaaacatgtgtactatcaggtaaatgccacttatttcagtgcacttggagaatcagaacgaaaacttctgttagcacgggcaattcagctgtttatgccgggaaaaccgcagatctggtatctggatctgtttgccggaaaaaatgatcatgaggccgtaaaacgggctggcgaaggcggacataaggagattaaccgtacgaatttgacaggcgtacagattgaacaggcgcttcagacagaggttgtacaaaaacagttagagttgttgcggttccgcagtacctgtaaagcatttacggaagatgcagatattcaagttcaggcagacaatcagaaattgatgattcgctggagtaatccggtgacagccgcacagttggatgtggattttgcaacaggaaactaccgcatatcctgattttagataatttgaacgcagaataagcaagtagcgaaagcgaattgcgaatgtccgctttacagcaggatatgagatcagtcagtttgtcataagatttttcaaatagttaaataaaagtaattatttaacagttagtagtcggataattaaatttatccgactacttgtttttttgcgtctgcatttgcttgtcgaattttgtacccgaaaaacattttgtagtttccctaaattgtgttaaaatagtacatagtgtttgagagaaaggaatgagagaagtaaaatgaaatctgtcattatctatgcgtccacgcatcgtggaaatacaaaaaaggtcgtggaagcaatttcaaaagaatgtggtgtagatctggtggatgcaacaaaagtgccggaaaaagatttatccggttatgatgccattggttttgcatccggtatctatgcgtccaaatttcatcagtctgtactgaattttgcatccgtcaacctgccggaggataaaaagattttttatatctgcacttatggcgcaaaaggatcttataaatccattgaaaaggtaactgccggaagaaatgcaacattgcttggaacttttggttgcaaaggatataatacctttggaccgtttaagctgatcggcggaaccggaaaaggatgtccgacagagaaagatctgcaggcagcagtcgatttttataaagagctggataaataatatgaatgacaaatgagaggtatcgaaaatgagtaaattactggaaaaatcattagatgaactgtgtgcaaatacagtagacaccgtagaccgtattatgggaagatacaatgtaggtctggaagaagcgtgt

SEQ ID NO: 13362 - DNA, 5210 bp, Unknown
  gut microbiota DNA sequence
tgccattgattacagtgagtggaaagaaaatgcacccgagatcacaccacaggaagcagtcatggatgaacatgagcaggagctgaaagataaatggatggaaaagatcgtaatgcataagattccggatttgttaaaacttggaattacactggaaaatgcgtgtgaatttgcaaaaatcagtttggtggaatatgaagaatataaaaacaagcttacaaactaaaagcaaactggaataggaaaaagcagttttatttgccgacggtggcggtcagtggtgcattaaaccatacgtttttgcctacttatccgaaaatatcgtgtagcagagcttcccgttcttccatggcttccggaggcagttcattaaatttgagcaccagtgttttgcacttcgcctggagtgccatgttttcgtcatcatcttcccaaatgtaaccctgtttcatacgttctgtttctgtcatgataccacttctgttgaagataaactgctaacgctgatagaaaaaatggagaatggatgtaaaaagactatgctttacaaatgaatgtatcgcttccaactgtaaaacggttattagctagattacagcaagaaaatatagttgtacgagaaggaaataatcggaaaggaaaatgggttatacaaaaacgttcggataactaggaatgaatactatccgatgagaagcaattatggggaaaagttaaactatgaaaaagcagatcaaagaaatattgagtatggtatggaaatataaccgaatctggggcggcataaaattactaaatgccgtcctgttagccgtgcttgttccaatcaacaccatactttttcagaaaatcatagacgatatactgattttattgcgtcataagcagattacaacgggaatgtatctggaatttggattgtttgttgctgcattgcttttggatgtgattttgacaagttttgataagtgcattgaaattcggtttgatatgaaaatgacagatggtctggaacgggatatcatacagaaatataaaaatctggattacagttgttatgagaaaagtgcgacttatgatattatttcaaggatttcaaaaaatccgggagaaaaattaaaactcatttactggaaaatcattgaaatcataaaaattttaatttcattagttggcttggtattagttttccgacaggcatcaaatctgttgattgttatatttatactgtttttgattccgatgctgtatgaaaattataaagctggaagtttgtggtatgaattgtatgccaaacagacaatggatgagcgaaaagttgcctactatgaacggttgcttacaagcaaaacaagtctcatagaattaatcatctatcaggcaacagattatattaaatctctgtgggaaaaacagagtgaaaagatgttgaaagaaaaagatgcaacattacagaaggttgaaaaagctttgttaaaaaagagcttgtttgctactttatggtatatctgctgcacagggatactaattcatagtgtaatgacaggtcatatttctgtaggtttatttattgcattgttcaatacaacgttaagtattgttggtaccataaccagcctgttggaaacatttggggatttttcaaaggaaatcaaagaggtatcctacataagttccttttttgaactgaaaaatacagaatcacgaacaggacatattgatcatccgattcatcgtatccgatttgagcatgtcagttttgcttatccaaattcagagaaagaggttttgcatgatgcaaattttgaaattgatctgtcgcgcagtactgcactggtaggagaaaacggttctggaaaaacaacgattattaaattgttgtgtggactttatcgtccaacaaaaggccgtattatgatcgatgatcaggatttgaataaattgagcagtcaggaaattggaaaattaataaaagtcgtatttcaggatttttaccagtatgaattgacggttcgggagaacataggatttggcaatttaggtgaactggatcgtgatgataagttaaataatgccttggaactggtgaatctgaaagatgtgaaagacttaggattagacagaaatttagggaagctggaaatggacggcgttgatctgtcaaaaggccaatggcaaaggttagcggtcagcagacttttcttgacagatacagcgtatgtgattcttgatgagccaaccgcatccatggatcctgtttctgagtacaaaatgtatcagttgttctgttcgcttatgaaatccagaggcagtttgatgatttctcatcgattagccagtgctaagatggcagatcatattttggtactgaaacatggaaatattatagagcagggaaaccatgatgatctgatgaaaaatcagggaatatattatacattattctgtaaacaggcagagtggtatacagcatagtgcagaatagatgattttgagaaaatattttaaattatgctgatcagaattgtgtagtaagttttgcatacattcaacttggaaatatatatgggggatagaaaaatgagagatctgttatttcgctcattaaaagatatacgcaggattgcgccgcggtcacttattatgcaggttatttgtatgatgctgcaatcggttctggtagcggtcaacacgtggctggtttccgtatttttaaatcatgtatatacgaaagatctgaaaacaagtatgatatatttaggtgtcatatggggcgtatttgttgcgtcagaggtgtcaaatagtgtattttatgcctgcatggtaaaaattgattccaaggttggtatgcaacttggaatagaattaggtgaaaagggtggacgcttgtcactgattcaatatgaggatgtagaaatcaacaatcgactgaaacgagcacaggactgtattgagcatggcagattttccgacttaagtctgtcggtattcaatattctggcagaagttttgaaggtaggaagtacattatttatattagccagatttagtccacttctggcattagtatcattactgagtgtggttccgtactttgtcgttcgattaatccgtggaaaagaattttatgaactaaaaaaatatcaggcagcaggtgaacgaaggcgaaattatctgtacgatttatttggcgataaaagagtggtaaaggaacttcgcatttttggaattgaatcttatatcgaagaaaaattatatcagacccgtgatgcaatgaatcaggaattatgggatttcaagaaacgtgatatttgcagctttttactatgtgagattttgtgcaaatgcggttatgtgcttagcattataatagcaattttacttttgctgaatcataggttggattttggtatgctggctgcttcgcttgtagcattcacctcttttcagttggcagcaaagtattttctgattagccttgggcggattccggaatgtgcggcatttgtaagagattattatgactttattgatatcgatgaagatgtacatggaacggaaaaatttgagccaaattttgataagataaatgtaaaaaatgtatgttttgcttatccgaatacagatcacctgacaatttctgacatatcacttgatataaaaaagaatgaatccattgctatcgtaggaaataacggaagcggtaaaacaacactggtaaaattactgactgatttatataaagtacaagagggtgagatattatatggaacgcaaaatatcaaggatcttgaaacgaaagagttttatcaaaatgtttctatcgtgagtcaggattttgtgaaatatgagatgacattgcaggaaaatattggtatcagtgactggaaacagatggggaatactgacaaaatccaggagcttttaaaacaaatggatttaccggagttatcagaagtggatactcttaatacgttgttaggcagtgaatttgatggcagagatctttctattggacaatggcagaaactggcaattgcccgcggcatgttcaaagaaagcagtataattgttctggatgagccaactgctgctctggatccaatcatggaaacaactattttgaaaatgtttttgcagattgcaaaagaaaaaacagctattattgtttctcacagaattggaatttgtcgggaagttgacaagatcattgtgatgaagaaaggaaaagttgtggaaattggtaatcatgatgaattgctggcaaaaaaaggtgaatattatcagctctataagatgcagcaaaaatggtatgtagaataaagcataataaggtaaagaaaataaaaaatgtttcatcaaaatgtatctagtgaaaagatacaaaaatatataaatgtgtaatgaatggagataaaaatgccagaaaatcgaacagatgaattatatcgtgccttacaggaaaaaggctatccagatgatttttgcagagaaattgcgtacaagcagatgaacacagattatacagcgacacgtatgcttggttatctgtatcgtgtttcagatccgcgtccggaggatgtagtggatgagatgctggccattttgagtgaccgcaatgcgattattcagaagaaagagatggagcatgcgcaggtcacaatgaatcgggtatatagagacgggctggataacttggactaaagatgcagaatgatagatgtatatgtattatcggatagagaattgatgatgcttatcagattattacatgggtaaaaagtctattatatgattataaaaattcaaaagatgatggaaagtgagaaaaagatatggtacaacaaattatgcatgatccgctgtttcttgcacagaaatcagaaccggcaaccaaagcagatctgcaggttggaaaagacctgcaggatacactgaaagcacatcgggaaggctgtgttggaatggctgcaaatatgatcggagtaaagaagaacatcattattgtaaatatgggattttttgacgtggtcatgtttaacccagttattgtttcaaaaagcggagtttatgaaacggaagaaggctgtttatcattaagcggtattcgtaaaacgacaagattcgaaaatattgaagtagaatatcaggatttctcgtggaaaaagcagcgtcagaaattgtctggatggacagcacagatcgtgcag

SEQ ID NO: 13363 - DNA, 4302 bp, Unknown
  gut microbiota DNA sequence
ctgtgtgatacctgtcatgataccgaacaccaaccataccagccagtctccggcgcctactgccgccagtgcttcaacccctaccacctgtccgacgatcatggtatctgccatcgtataaaactgctgaaagatatttccaagcatcagtggtatagcaaaagtaatgatcagttttccaggtgatccagtggtcatatttttttcatttgttcccataagaatctcctttttcttctcatccttgtccgattattttacataggactctgccaaaacacaatcctctattgtattatatggcacattgatatttttagctaccacttttgggtgacatcttgtcactttgacttgttaattggattttttatagggataattgtggatttgtaaagaatgctaatcaggagttgttgaataaagtaaaaagagtgaaaaaataaaaaactaaatttatcggaatgagaagtacttgtttattatgataaatttgctatggcataagcgttttcaagttacgcaagaaatattgcagtactgttttcagtaagctattatgttgtagataagggagcggagaaaacttaccttggcagcgattgttagctaacaaggtaagttttttggctcctttttaatatagtgttacgctttacttcatcgaaacctgtcctttatacttattataaagctctttgatctgttccagctcagacgcagtcagcgtatcttttgcaaactgcttcaatccggcagtatcgccgctggtgatgtaggaagaagcttctttcattgtatctgcggacatatgattcgtaatgatctgatctacggttgcacggtctgtatcgttcatggcatcaaggatttcctgggcattgacgcctgcaatggcagatgtatcggatgtgatttgtgactccagaagtttttcagctacaacaccggcggcttttgtttttatttttggcaaggcaacaaaatagctaaccagtaaaataatcacgatagcaaacagaaaaacaataaatttttgaaaacggtgccgtttatgtggatatgccataatgtaacctcctcttaatgtcggtgagaaaatgcaatgattctgagaagaatgtaatagactacgttgaccagaatcatgtatcaagtctcatgtgttgtcgattttacctgtttctacttattatagcatgtacgatgtggcgaaactgcgaattcaaagaatattaagaaaatcttcaaaataaaggaacgatttttcatctggaaaaagtgctttatgccttaccctgaatatttgcatttgtatgtaaaaaccgttataatcagaaaacaggaaaaatgaggtaagaagaaaggaacacatacatatatggcagcgattttttttgatattgacgggactttatgggacagggacaataacattccacagagcacaaaagaagcaattcatcagcttcaggagaacggacatcagaccttcctctgcagtggaaggacacgcgtgtttatcaacagtgaagagctgctcggtatgggatttgacggcattgtctgcggttgtggcacctttatagaatataaaggaaaagaaatgctgtacaaagagattgaccgggaattattgaaaaaggcagtacagatattttatgattatgatattgccatggttatggaaggccgccatatgctgtacatggatgcagacaagatcagcagagatgcatacggaagatatctgctggaggttatgaaagactgtatgctgccgattcaagggcatgaggaacagtgggaagcaagtaagttttctgttttaatccatgatcgggattatccggcggtgatcgaattattaaaggatgattatgattttatggttcacggggatgtggccatggaagtagtaccaaaaggatacagcaaagcgagcggaattgcttttgtatgcgaaaaactgggaattgatgtaaaggatacctatgcattcggtgacagtgccaatgatgtagacatgctggagtttgccggtgtgggagttgcgatgggggacggaacggatgtggccaaagagcatgcggattatgtaaccagggggttgcatgaagacggtatttatcatgcactgaagcattttgcattgatttaaaaaatgaaaaagtgagaaaaagtaagaaaaaaagagtatatatgagaaaagtggaaaaaatacacatatatatatgaaattatttagttgcgattcaggtgcaaaaaaactattatatgactatcggttagcactcagaagaaatgagtgctaataaaacaaaagaaagcatagaacttatatatagaataaggaggaatcacatcatgaaattagtaccattaggtgacagagttgtattaaaacaggtagaggcagaagagaccacaaaatccggtctgatccttacaacaagtgcacaggagaaaccacaggaagcagaagtaatcgctgtaggacctggcggaatggtagatggcaaagaagtaaccatgcaggtaaaaccgggtgataaagttatttattctaaatatgcaggtaacgaagtaaaattagagggtgaggagtacatcatcgtaagacagaatgacatccttgctgtagtagagtaataaaattgaaggaggaaaattatcatggcaaaagaattaaaatatggatcagaggcaagaaaagctctggaagctggtgtagataaattagcagataccgttcgtgttacattaggaccgaaaggaagaaacgtagttctggataaatcttttggtgctccactgatcacaaatgacggtgttacaatcgcaaaagatattgagcttgaggatgcattcgagaacatgggtgcacagcttgtaaaagaagcagctacaaagacaaatgatgtagctggtgatggtacaacaaccgctaccgttctcgctcaggcaatgatcaaagagggaatgaaaaacctggaagcaggtgcaaacccaatcgttatgagaagaggtatgaagaaagcaactgaggctgctgtaaaagcaatcgcagctatgagccagaaagttgacggaaagaaccatatcgcgaaagttgcagcaatctccgctggcgacgagacagtaggaaatatggtagcagatgctatggagaaagtttccgcagacggtgttatcacaatcgaagagtccaagacaatgcagacagagttagacttagtagaaggtatgcagtttgaccgtggatatatttctgcatacatggcaactgatatggataaaatggaagcaaacctggatgagccatacatcttgatcacagataagaagattacaaacattcaggagattttaccactgttagagcagatcttacagacaggtaaaaaattattaatcatcgctgaggatatcgagggtgatgcattaacaaacctgatcgtaaacaaattacgtggaacaatcactgttgtcggcgtaaaagcaccgggatatggtgacagaagaaaagcaatgctgcaggatatcgcaatcctgacaggtggtactgtaatttcttccgaacttggtctggaattaaaagatgtaacattagatcagcttggtcaggcaaaatctgttaaagttcagaaagagaacacaatcatcgttgacggtgagggtgattctgaggcaattaaagcaagagttgctcagatccgtgcagagattgagacaactacatctgatttcgaccgtgagaaactgcaggagagacttgcgaagatggcaggcggcgtagcagtgatccgtgtaggtgcagctacagaagcagagatgaaagaaagcaaactgcgtatggaagacgctctggcagctacaaaagcagcagtagaggaaggaatcattgcaggtggcggatctgcatacatccatgcaacaaaagaggttgcaaaacttgctgagacactggaaggtgatgagaagacaggagcaaaagtaatcctgaaagctctggaagctccgttattctacatttccgcaaatgcaggtcttgaaggcgctgtcatcatcaacaaagttcgtgagagcgagccgggtgtcggatttgatgcagcaaaagaagagtatgtaaacatggtagatgcaggaatccttgatcctgtaaaagtaacaagaagtgcattacagaacgcaacaagcgttgcttctaccttattaacaacagagtctgttgtagcagatatcaaagagccggctccggcaatgccagcaggcggtgcaccaggaatgggaatgatgtaa

SEQ ID NO: 13364 - DNA, 523 bp, Unknown
  gut microbiota DNA sequence
ccggcagccacccgctctcccatgccgtctccagcatagtaccataggccgcttaggtcttaaccatcgtgttcgggatgggaacgggtgtgtcccctaagcgcatcgccaccggaaatatccagctatctttttgataactcaacagcgaaataatctctactcgatttccttagaaaggaggtgatccagccgcaccttccgatacggctaccttgttacgacttcaccccagttatcagacctgccttcgacggctccctctttgcagttaggccaccggcttcgggcatttccgactcccatggtgtgacgggcggtgtgtacaagacccgggaacgtattcaccgcagcattctgatctgcgattactagcgattccagcttcatgtagtcgagttgcagactacaatccgaactgggacgttatttttgggatttgctccacctcgcggtctcgcttccctttgtttacgccattgtagcacgtgtgtagcccaagtcataaggggcatgatgattt

SEQ ID NO: 13365 - DNA, 19249 bp, Unknown
  gut microbiota DNA sequence
gacctcttatctgctggtgatctttgtcgttttatgtctggtcacttttgcagccctctctctgtccagttcactgagagaccagtcttatacaaaaaaactggcagcgcaccagactgcttatgccagtgccagttcagaggcttccgcacgtctggcacagattgataccgctttggagaaatcagatgctgctgccgcactgcaaaacctcagtgatgtcactgtcacagaagaaacagatggtctgcagattgattacacgattccggtaaccgacagtcaacagttggaagttacggttctggcagatccagacaaccattccagacggattcttcgctggaaagaagcagctacttctgactgggaagaacagacaacacttcctgtgattggaagcgatcaataaatcgtgctatatagtcttatataaaagaactacataattcaagaatgatattattttgtatacagatattacatcattcattacaaagtaaaagaaaggtgcatgtttattatgaaagttactgatttgctgcaaaaagcagttgccgatcatgcatcggatatttttatcgtcgccggtcttccgccttcctatcgtgcaaacgggcggattcttcgcgaacatgaagaaaaactgatgccaaaagaaacacaggcttgtgtcgaagaaatctatgaattagccggaaaccgtgatatttccaacctgttaaaacgcggagatgatgatttttctttcgcggttccgggactttccagattccgtgtcagcgcctacaaacagcgtggtgcactctctgcggtcatccgtgtcattacctttgatctgccacatccggaagatatcggtatccctgattctgtcatggatttttccaaattatccaaaggtctggttctggtcaccggtcctgccggaagtggaaaatcaaccacccttgcctgtctggtcaaccagatcaaccacacaatggaaaaacatatcatcaccctggaagatccgatcgaatatctgcatcgccatgacaaaagtattgtcagtcagcgtgagatcaatattgacaccttaagctatgtcaatgccctgcgcgcttcccttcgccagagtccggatgttatccttcttggagaaatgcgtgattatgaaaccatcaatgtcgctatgacagcagcggaaaccggtcatctggttttttccacactgcataccatcggtgctgccaataccattgaccgtatcattgacgtttttcctgcgaaccagcagcgccagattgcggttcagctttccatggtgcttcaggcagttgtctctcagcagttgattccagcgacagacggcacacaggttccggcttttgaggttatgacagtgacacctgcaatccgaaatatgatccgtgataacaagattccacagattgacggaacggtctactctgcgaacaaagaagatatgcattccatggattacagtctgcagcaattggtaaaatcaggaaaagttaccgctgaaacggcactttcctatgcaaccaatccggaaatgttaaagaaaaaactgtaaaaaatacccgtacgttacagcgtatcagagatctgataagtgtaatgtacgggattttttattatttccatatatgtatggcaacttcatctcagtctgagttgagactcccacttctgcaagtggtgagtagtaacaagtatttctcagtgggagttcaatctccgactgagataaatgctccgcgagggcgcacattgtctggaagacaatggttttgcgccgaccggaacggagtgtagagtgcagtgattctgaaaagaagatgtcagcttgcgctgaccagaatcacgcaccaagtctcacgtgcgttcgacttgaatatacatgccatctttttttcgatgcattttatagtattatatcatccgtatcaataccatatatatcgcagttcctgctgcaatactgatcaatgtattgtgtttccatttgtaactgatgccaaccgtcagcactgccagtatttttggaagtgcattggctttccagtccacagcaatatctttcagacagtatacgatcaatactgccataatcgctgccggaagcacagctcccagttttaccagaaattccggcattttgcgttctccgtgaaaaatcagaaacggaagtgcccgcaacgcaaaggtgataacggctgccagcaaaattgccagcaggacatattcgatcttaccttttgctcctgccgctatgctcagtactgcacctgtcacagttcctgccttattacacagttgcatctgcatcccggtcacgctcctttctgcagttccacaagattaatatcgctgatgtcacgatcagagacggaagcagaaaataatccacgccaacaatcagcagacatacaattcccgctgccagaccgatcaacgccggaaaatgactctttgctttttcccactgatcaatgaaaataatgacaaaaagtgctgtcatgcaaaagtcaaccccctccatatcaaaaggcagcaactgacctaatacacctccaagcacagctccgatcatccagtaacaccggctgaacaatgccacaaaaaacatcaggccacgcttcgtttctccctgttccgtcagggagcagtttaccgcatacgtttcatccgtcatggtatggatcatgtaaaacttccgtttttccatttttgcaaattcatccacaaaggtcagggcataaaaactctgacggctgttcatcaaaaatgcagtcaacgcaatggtcagaaacgatgctccgccggaaagcagcgtcacaagcacaaactgaaaggctcctgtatacacggacagactgaccagcagagaataataccagtgaaaacctgcttcttccatcataattccatatgccatactgacaaacaggtagctgcacagaatcggaatggattttacaaaggcttccttccagatgtttttattttgttcatgagtattccttttttcctgcggtgtcttcgtattctgcatgctatacttctgtctttctctttttcctttatttttgtgatacaattatttttgcccacaacttgatgaagatgctcaatatttctgttcgcaaatgctgcatccgcttcttcttatttattattttaaagtagcgttcatacttccggtgcgataaccaaacagatccagtgtcacgtaagtgaatccataggatttcaatgcgttggcaatctgttctctggttgccggctccatcagtttcgcaaactctttcggttctacttcaattcgtgcaatggttcctgtggtatcgccggtctccatatcaccaccgtggatacgcactctgacctgatgaaaaccaagatctaataataactgctctgctttgtctaccatgccaagttttttctgtgtaatcgtctccccgtatacaaaacgggatgacagacaggcaaaagactgtttttcccaggttggcagattcagatatttggacagtgcacgaatgtcatctttgctcatctgagcgtaccgcagcggacttttgatatcaagctctgcgactgcctgcagtcccggacgataatccccgttatcgtcggtgttggagccttccacaatgttttccattccctgctcttttgcgatcacctgaatcttctcaaacaactcatgcttacacagataacagcgattcttcggattctgtgcaaaaccttcaatgtcaagttcctcagattcgcagacaaaatgtttgatgccttcctttttacaaaaagcaattgcctcgttcaattcccgttttgggaaggaacaggattctgctgttactgcgatcacctgatctcccagtgtgtcctttgctacctttaacagaaacgtggaatccacgccactggaaaacgctaccgctacggatttcagggagcgtaaataatcctgtaatactgcgtatttttctttctgttctctcgttaattcttccattgtctttttattcctccgttttcttccccttctacgactgtgtttattttataatgtttatccatataatgtcaatatgaatactatgatttttctagggttattggaaacggacgtaaaatgtttattttgtaaaaaaagctctttctttctagtttgaaagacgctataatggtgtcgttactcatttcatttaacaaactaaggagagaaagttatgttagaaaagttttttaagctcaaagaaaacggcacgacagtgaaaactgaaatcattgccggaatcacaagcttcatgaccatggcatacattctggcagtcaatccgagtatcatgtctgctgccggcatggatcacggagcagtctttactgctactgcactggcagcactgatcggtacgctggcaatggcactttttgccaattacccatttgctctggcacctggtatgggattgaatgcgtactttgcttataccgtagttatcggtatgggttatagctggcagttcgctctggcagcggtatttgcagagggtatcatcttcattgttctgtctctgacaaacgtacgtgaagcaattttcaatgcaattccacagaacctgaaatccgcagtcagcgttggtatcggtctgttcatcgcatttatcggtctgcagaacgcacacattgttatcggcggttccacactgcttcagctgttctctgtagacaaatacaatcaggtgaacggtgtgacagctacttttaatgatgtaggaatcaccgttctgcttgcaatcatcggtattattatcactggtgctctggttatcaaaaatgtcaaaggaaatatcctttggggaatcctgatcacatggggacttggtctgatctgtcaggcagcaggcatttatgttccgaacccggatcttggtttctataacctgcttccggatttcagcaacggtctgtctatcccgagtatcgcaccgatcttctgtaagatggatttctctggtgtattatcattgaactttgtagttatcctgtttgcattcctgttcgtagatatgtttgataccatcggaacgctgatcggtgtatctacaaaagcaggtatgcttgacaaagacggcaaacttccacgtatcaaaggcgcattacttgcagatgccgttggtactacagctggtgctgttctcggtgtatccactactacaacattcgtagagagtgcttccggtgtatccgaaggtggtagaacaggtctgacatctattactacagctgtactgtttggtctgtctctgctgttatccccgatcttccttgccattccgtccttcgcgacagctccggcactggtaatcgtaggattctacatgctgacaaacgttacaaacatcaacttcaatgatgttattgaggcaattccatgttatatctgtattctggcaatgccattcttctacagcatttccgaaggtatctccatgggagttatctcttatgttgtattaaaccttatcacaggtaatgcaaagaaaaagaagatcagtattcttatgtatgttctgacggtgctgttcatactgaaatacattttcctgtaaattcaatttattatttctatagttaaattaagaaaaatcgtggggttttgtcttctcagctaataatagctttcgaagaaaaaatctcacgatttttcatttatgctatgaccaaaagatacagattcttttatctatgtcgcggcaaagatatgcgaatccccacattctaaaaacacggcgattcatctcagtctgagttgagactcccacttctgcaagtggtgagtagtaacaagtatttctcagtgggagttcaatctccgactgagataaatgctccgcgaggatgtgcagtgattctgaaaagaagatgtcagcttgcgctgaccagaatcacgcaccaagtctcacgtgcgttcgacttgaacatcgatccatgccatatgttctgcaatttctacttcttccccgtatgttccagtgaaccgttccactgcctgcattccaatcatccagtaatggcaggtgtcatcttcctgggccggcagatgatacaaaacgatccggtctgcatccagtgcgtgaatacactccattccgctctcactgccaagctgatacagattcacaaaggcaatatcgatatgatatgcataacgatgaaatgctgtcgcatcttccacactaaggacaccgtctccggacacaaaaaatgcttcgtttcccattttgaccaaaaatgtctcatgtggatcgtttttccacggttctccaccgtcatgaatggtccgtctggtgatgatctctgcatttttaatgtgtatgcgacacatgtcctccccaaggtcatgaacctctgcatgggaggcttcccagtccggtgcatatacggtaagctgccgtccacgctctgccatctgactgcaatatgccgccgtcagctgttcctgataatgatccggatgccgatgggtaaaaagcaatccgtctacttgctgcaacattccacggcattgcttcaaatccgccatccacgcctccggcatggcagacattccgactttacttccatcataaatgccatcgatcagaataccggtgccgttccggtaaaagaacagaccggcatttccgatatgaaaaatagctgtttccatctcattctccctactgatgattctgccagacttaacttgcaggtctactcaagataaactgacatattctaataaaattactctgtcagcaggcaaataaaggcatctttatccaggtgactgtagcaggcttccaggtcaaaatctttcaggtgctctgccagtgcctccggctgcagcggacatccctttaaggtctcctgcagttcttcggtatctccatttccaaaataatcaccaaaactccgatagtcggtgatgcagccgtgttctacattcatactgatctcaatctgtccacagccttcgattctgcgctttttctgtacggagaactccggtgatgcgccataattccattcccaggtattgtagcgttcttcctggatctgctgaatgcgttttaattcttcttcgctcagatggtggatttccacgtcttcgccctgaaccatgtactgttttaagatatttttaaaggtttccatgtccatatctgccggtgcgtacggtttgatattcgtcacacggcttttgaccgatttaaagccttttgactcgtatttgtcactggaaacctgcagcgcttttgataccacagacagatccgaatcaaacatcagcgttccatggtgcatgattcttccatgcttgatatactgggaattaccggaaaatttttttccgtcgatggtgatatcatttcttccactgacttctgcctttactccaatctgctccagtgtattaactaccgggctacaaaatgcatgcagatttaatttttccatatctccggtatccgcgataaaggtaaaattcacatttcccatgtcatgataaactgccccgcccccggacaatctgcgtactaccgtgattccatgctctctgacatatgtctgattgatctcctgtgccgtattctggtgcttgcctacaacgatggtattatgattctgccataaccagaaatactctctgtcctttggcatttcgtcaaatacatactgctccagtgccagattaaatctcggatcatttgagttactctcgataaaaactactttttttcccatgtcttctcctttagtcttccttttattgccattttttaacaggaaattatccgtcttcactcgggtttattttatcatacattccatatatgttcgatagttttttcgtaaatttccaaattgcaaaagttctcctatcagattctcaatactgcaaaaggaaccatcactgccgatggttccttttggatagagggttagataagggttttgaatatactcatctgttatcagagagggatggcgtccttttctgaaactcatatattcaatcttccagtttgcagcgaaatctgttttcatactcctgtttcagactttctctgaacgcaggcgctgcgatatgaatcaactggcgtgcacgctcttttaacgtacaaccatgcaattttgctattccatattctgttacgacataatccacatcacatctggatgtcgtaactgctgctccttcggcaagcagcggtacgattttggaaatggttccttttgcagcagtggcaggcattgccataatcgttctgccgccttttgacatattggctccacgtacaaaatcaacctgaccaccgacaccggagatctgttttaagcctacagactcggaacagacctgtcccatcagatccacttccacacaggaattgatagataccacattgtcattctggcagatgactctcggatcatttacaatatccaccggtttcatctgaaccatcggattattatctacaaaatcatataatttctttgttcccatcaggaacgttgccacgcactgacctttgtcaatctgtttgcatttgttggtaataacacccgcattgatcagatcaactacaccatcggaaaacatttccgaatggataccaagattttttttattttttaaaaacatcaaaaccgcatctggaatcgctccgattccaagctgcagacaatcgccgtcttttaccagagatgctatatgctctccaatctttttctgcacttcaccgatctttggaggctgaagttcgatcagattggtatccattggtacaatataatccagttcggatacatggacaaaattgtctcccatagctcttggcattttttcattcacctgtgcaattcgaatcgcggcacactcagccgccgcctttgtataatcacaggatacgccaagggaacagtaaccgtgttcatccggggcacttacctgaagcagcgccacatccacatgcatatcattccgaagcagatccggtacttcagagaagaaaaccggcgtaaaatctgcgcgtccttcctctactgcctgtcttgtagatcctccgacaaacaatgcattatgtcgaaaatgtttttccatctccggtgcacagtaaccggcttttcccatggcaaccatatgtaccacttctatctctttccagtcatatttttcagctgcttctgtcattgcatctgtgagaacgaccggttctgcgcaggcatgcgctacaacgacacgatctccggaatggatgtgggatactgcttcttttgccgtacagattttttgtttatatacttctttccagttcataaaaactccccatttcttgcagaacccattactactgatttttcttataaacctggcaaacgaaacacttgatttcgtccgccgggtttgttcctgtttttatcagtaaagctctcgatatattttgatcagtctgtctctgtctaacggcacgaagttatttgccagcagacgctgctgattttccagtacagaatctgcaaattcttcaatctcagactccttcatgccatactcatgtaatgtttttttctggatgatcacatttaacagtttctccagctcctcatagacatctttctcatcgcatccaagaatatgtgcaataaatttattcagaactgcgatctccccatcggttttcagttccatataatttttcataactccggtaaacatcgcataattggattctccatgtgccacatgataagtagcacccaacggatagctcattgcatgaacggctgcacaacctgcatttgcaaaggcaatacccgcatagttagaagccatcagaaactggctgagcagcgcaatccgtgcctcttttcctttttctgcaatttctttataaccatttaagatcatgctgatcgcctgatagccaagcagccttgttgtctcatttcccttcggggaaaggctggactcaatggcatggatcagtgcatcaatagaacttgttgcaaatacaccaaacggaagtccttccaacaactctggaatgagtacggcggtatcggcatacatctgatccactgccagaccttttttggttcctctgctgtttaacgcaaggatggaaatgttggtcacttcggaacccgttccacaagtggtcggaatcaaaatcagttctttattttttaccggtgggattttgccgtcatacagatccagaaccggggaaactgtccgtaacgcaaacagcttagaaatatcaataacggttccgccaccgatggcaatgacacgtttatgttcccctttgatatccttatacatcgcttctaccatgtcatcggatggctcccctgcaccgtatttttcctgaaagatcacatcacattccagattcatctgtccgaaatacggattgtaaatatactcatttgtgataaccagatcacctttgcccggtttgaattcatctacaaattcctttacagtatcatatttaaaaatggttggttttaacattaattcctgcatttgttctcctttcgccgatgcttaaaagttaatagcccggccatagaaagctgccataaatgcctccggcattgcctcagaaactgtcggatgcggatggatggctccgatcacttcctcagcagttgcttccagattcattgctacagagatctctccgatcatatctgtcacatgttttccgtacagatgtacaccaagaatctctcccagttctttatccaggatcacttttacaattccgtcggtgtctccctctaccagagatttgccgtttgccatcatcgggaatttgccaacctgaatgtcatagcctttttcttttgcctgtttctctgtcagaccgatgcaggcaatttccggatcaagatagatacaggatgggattctgccgtaatccatttcatgatcagcttcaccacaaatgtctgccactgcaacaaaaccttcgtgggatgcggtatgtgccagcataacttttccattgacatcaccgatggcatagatattcggaatatttgtatgcatatgaccgtctgtcttgattgcttttttctcaaattcgatgccgatgccctctgtattcagcccgtcggtatttgccacacgtccgaccgccatcagtaccacttctgcctctacagctttctgttctccgttgtattcataaatcacgctgttatcttttactttctgtacttttgcaccgttgcagaataccacaccgtttttctccatacgttttttcgccatatcggatacttcttcatctaccattggcaggatgtgatccatcagctccagaacggttactttggaaccaaggtgtgaaaatacatgtgcaaactcaattccgattacaccaccgccgatgattgcgatggactccggaagcttatctatatttaatgcttcgcggcttgtgattacatttgtattgccttccagcggaataaacggcggcataaatgtgttggaaccggtagcaataatgaagtaatcagatgtataagtttttccttctacttcgatggtatgtgtatccacaaaggaagcatgaccgttgatgatcgatactttattcgcgcgtaacaatccctgtacgccggttgtcaacgtcgttactacaccgtttttgcgatcctgcagcttcttcatatctacttttaatgcagattgatctactccgaaaattgcaaatttctctgcttctttcatctcggtatacagatttgcggtacgaaccaatgtctttgtcgggatacatccctcattcagacatacaccgccaaaatgttttgcttccacaatggctgttttcttgccggactgagcagatttgattgctgtctcataaccgccagggccagcaccgatcacgatcacttcgtaatcgtatgttccggaagctgctgtcggagccggtgtcggttctgctgcttttgcaggtgcttcttcctgtaccggagccggtacatccacctctgcgcctgctgccgccagtgctgcgtccgcatcctcgcccggatcgccgacaacggcgatcggggtgaatacgtcagcagtttcaccttctgcaaggacaatttttaatacggttccatctgcggtagcttctaccggcatcgttgttttatctgtattgatttcaaaaaggacttcaccttttttgatgctttcgccttcttttctgtgccattttaccaactcgccttcatccatattgaaaccgagttttggcataatgattacttctgccatgacgccctcctacagtaagatttttaacggattttccagcagttctttcatatactctacaaactgagaagctaacagtccatcaatcagtctgtggtcaacagaaagctggatgttcatcatcggacggatcacaatcttatcctcaccatcttcttcgatgacaactggtgtcttacgaacagagctgatggaaagaattgctgcctctggcggattaatgatcgcagtaaagttgccgataccgaacattccaaggttggaaattgagaacgttccgcctgaatactcctccggtttcagatggccttcttttgcacggtcaaccagatctctgttttcttcagaaatggctgtcagcgtcttctcctgtacatttttgatgacaggaacgatcagaccattatcaccagcgactgccacaccgatattggtactcttatatgtcacgatattgccatctaccagagaagaattaattcccgggaatttctgtaatgctttgcttgctgcataaacaaggatgtcagatactgtaatttttctgtcagatacttcgttcatctgtttacggaaagcagtcatatttgttgtatctacagcgtctgtaaaatacagatgtggtgcggtaaatttgctctcagcaagtttatcaccgataatcttacgtactcccttgtaaggaacagaagaaagaatcttcttgtccggattttctgcaggtgctgccgccggagctgcacttgctgctttctccacatcggctttcatgatcttgccattgatgccggttcctgctacggtagcgagatccacaccactcttttctgccagttttcttgcaagtggtgatgctttgatatctttcgctgtgatgccgcctcggaaacctgttcctttgatatcttttaaggatgcaggattaatcccctcatcttttaccagtttctttgccttcggtgtcagcttcagatctttgacatccactgccggagctgcttctgcggctgttgcaacaggtgccgcgttttcttcctcagcaggtgttgccggagcgcttccaccttctgcaccctcaccataagctgccagtgctgcgtctgcatcttctcctgctgcaccaacaactgcgatcggagtaaatacatctgcatattcgttttctccgagcattgtttttaataacacaccgtcaccggttgcttctaccggcatcgttgtcttatccgtatttatctcaaaaagcacttcgcctttttttacttcttcgccgactgctttgcaccagcgtacaagctgtccctcgtccatattaaatccgagtttcggcatacagattacttctgccatttttatgtcctcccatttttatacttataacatctctttgattgctgcgtagattttcttgtcatccggaatcagcgggaactccagagccgggctgaatggaagcggaacatctgccgtaccgagacgtttcaccggtgcctccagatcatagaacacttccggcataattctggttgcgatctcgccgctgataccaaagctctcatgtccttcatctacgatgagcagttttcctgttttcttcacagatttgatgattgtatctgtatcaagaggtacaatagttctcagatcgatatgatcaacagaaatgccttctttctgtaattttttaattgctttctctgcttttacagtcatgatagagtttgttacaactgtaatatcatcaccctcggataccattcttgcctgtccgaatgggatggtataatcttcatcttccggaacatcaaatttggttgtgtaaagcattttatgctcgaaaaatacaaccgggttgttgtcgcggattgctgttttcaataaaccttttgcctctgctgctgtggacggaacaacaactttcatacccggacagtgagcaacccatgcatggaaagactgggaatgctgtgctgcggaagaacgtccaccaccgatcggcatacggataaccatcggaacgcttacctgtccaccggacatataagtgatttttgccatctggttacagatctgatccatacaaaccatcatgaaatcaccgaacatcaactcaataaccgggcgaagtccacgtaaggcagctccaacgcccatgccgacaaatccctgctcagagatcggtgtatctttacatcttaagtctccgtacttgtccatcagaccttcggtacatttgaagtttccaccgaggaatccaacatcctcacccatattaaatacagtgtcatctcttgccatttcttcatctaatgcttcccgaacggcatctctatacatcatatttttcatttttctgttcctcctcttaatctacaaatacgtcggtataggcttctgccatatccggatatggactttcttctgcaaatttacatgcttcctgaatctctttttctaccatctctttaatctcagcaatttcttcgtctgtcagaagtttcttatcctcaaggatcttcagtggttcttttgctttccactcttctacttcttcctccggacgatacagaccaggatcacctacgtgatgtccctgccaacggtaagtcatacactcaataatggttggtccgccgccttttcttgctttttctactgctttctgtgcttcttcatatactttaaatacgtcatttccatcaattgtgataccttcgataccgtatcctgcggcacgttttgcaatatgatactcttttgttacacgacggatatctacggaaataccatacaggttattttctaccacatacacgattgggagatcccaggctgctgccatgttgatgctctcatggaatgttccttcattggaagcggaatcaccgaagaaacatacggtaacttcatctgttcccatgtatttggatgcatatgcggaaccagttgcgattggaatctctccgcctacgataccgtttgcaccaagaatacctttgtccattgccatgatatgcatggatccacctttacctttggagtatccggttgcttttccgaggatttctgccatcatcttgttcagatctgcccctctggaaaccagatgtccgtgtccacgatgtgtacttccgataaagtcacgttcctctaatgcgccacatacgccggctgctactgcctcttccccaagatacagatgtgccagtcccggcatcagacctcttttataaaactcaaatacttcttcctcaaatcttctggtccgatacataattgtgtaaaactcttttgctttctgtttttgttcctgctttgtcacgtcaaaccttcctccctttcaacaatttgattgtgattttcttgttactctatattcagcaaaacttgtgccaattttttctgattatttcctgcttttctatcattttatccgatttttatgtgacattttggcgcatgtgtgctattatcttgtgtgacacatatttgtatggcacacttctgggtggcacacttttgtgcagcactcctttaagcgacacacttttcgtattgcagtttgttgtcacacttttatatgatattcttgatgctacattttctgtacagcagatgtgtacacataacactacttataactaaatgtaaatgggatattttacaggggaggagattttatgatttcagatacttatctgtctgccttaaagcaggcacgcaaagattttatggaaggaaccggtcatccggaaatgatcattcgggaagaagtgctggattcctggcggcgttcccgggcatttcatatcaatgcacaggatgcccgctgcaacattttgacacaggagcaattacaggaagccattgcagaaaatcaggtcctttacgatatcgcatcttccttcattgattatctgtaccagatcgtaaaaggctccggatttatgatcatgtttgcagatcaaaacgggcatgttctgaaacttgtaggagatgcagacattgtagaaacggctaaaaatcaggatattccattgacagaaggcagctgtcgtctggaatcggtgcttggcacaaatgccatcggcacaccattgttttccggtaaaccaatccagctgtttgcttatgagcactattttgagctgagttctaactggacctgttccggtgctccgattctgctcaaagaccaaattctcggtgtcatctgcatcagcggttcctgggaacgggcacatccccacacccttggcatgataatgtctgctgccgaagcaatttcccgtcagctttatctgaccgaagcaaacgaacatctgattgctatgcgaaatcagcttcagaccagtattgattccattcacagcggtattgttctgctggatgcagattataacatttcatatgtaaatgcgatcacactgcgtactctgaattttgcgaaagaggacatgttaaatcattcctaccgggagatttttccaaatctggaacttgaaaaattaaaagaaaatacctacgattttgaaacaaccgtctgcggaaaacaggaagcctttaaatgctatatcagcattaaatttgtggcaccaaccaactacagcaacaaagaaagttttctgatttctttccggaaaacagaatatatccagcagctagctaacaaagttatgggttcggacgctcattatacttttcagaacattatcggcgaatgtcctgcactacagcgtttaaaaggtcttgccttaaaggttgctcagggaaataccagtgttctgatcaccggggaaagtggaaccggaaaagaattgttcgcccagtccatccacaataacagtccacattcaaacggtcctttcgttgccatcaactgtggtgcgattccgaaagatctgattgaaagtgagctgttcggctacgattccggcgcttttaccggggcaaaaaaagaaggtcgcgccggtaaatttgagctggcaaacggtggcacaatctttctggatgaaattggtgatatgccttacgaagtacaggtgcggctgctgcgtgtccttcaggaaaaatctgtcacacgtatcggcggtaagaaatccattccattaaatgtgcgcgtcattgcagcgaccaatgtcaatctggaagaagcgattgaaaatcacgtattccgaagcgatctgtattatcggctgaatgtttttagtctgcatattcctccgcttcgcgaacgtggtaatgacatttttctgctgacagatcactttctacagaagtatcagaatccgaaaagtgaaccgatcacaaaaatttcagaagaagttcgaacaatctttgcagcatatacctggccgggcaatatccgggaactggaaaatgtaattgaacgctgctgtattctgacctctaacggaacactgacaaaagaagcccttccttccaatatgcagcatgtcctagaaaaccaaaatcagatacagtcagaaaatgacatgaaaacaacggcagccagttctgcatcacctgttgtttccggcaatttgccactaacagacatccctgctgaaaatatgtcatcggttcaggatacttttgtatccccgacagaatccgtgatgaacacggatcacatcacttcagctattaccgctgaagaatcggagaaattactgattatcgaacatctgaaacaatccggtggaaatgtaaaaaaagcatccgacagccttggtataagccgccgcacgctttatcgtaaacttgaaaaatatgaaattgatccggcagaaatccgatatctgactcaccgataggataacaaaagcggaacaaacattcattatatcaccgaaaaatgatgtaaaagagagcagaaaaacttacctctgcagctgacggtcgtcttgccgggaaaagtttcctctgctctctttatttacgttattttttatcagaaagtctttcttctctgtttacctcaacgtctgatatagatctgaagctgcgaaaagtctactttttccgtatccgttattccctgaaatgtcgtatccagtaaacactcatcgatcagatttccctctgtctttatatcatgttgtttcgcccattccagcaattcgtctactgcctttcgtttatatggcatgtcgaaccgattcatacacaaatactctcctgctggaagtgtcttgatattttcactatactgcgctatatcaatttctgcgttctccggcagataaataaatccacctgcttcttccagccagtcctcattttccagatttttttccgggaaaaatgctccccatccaagatcatctgaaaaatcctgctttccaagttcttttctgatattcataaacgtctgatacagtttacttcgtgtcatgaatgttgtcccccatggcatcataaacagcattcttttggggaaatatttgatcattggaatcgatactgtatataactccagtcctgcccgctctaatgcataaatccggttgttgattttttccactttacggttcatgctttcaatatctgtcagcatcttctcccgcgatgccttcaatcccttcttgatattatccagacttttctttttaatattcgccttgataacttccagcggaacattattattcttcaaaaaaagaatttcccgcaattccatgatctgacttgtcgaatatttccggtatccattcgtgtcaataaattccggtttaaacaaatcaatggagtcataataaatcaaagtctggcgcgacaccccaaccgtatctgccaattctttcactcccaaccattgcctgtcttccatttaagtacctcctcttatgttgaaaagtttatttgacttttacccccccc

SEQ ID NO: 13366 - DNA, 71736 bp, Unknown
  gut microbiota DNA sequence
atatttggattttttttcgaagtacaaaaaaagccgaaaattcccggaattactccgggaatttcgtgttccgtcatatacggatatttttatgtatctgccatctgatcatacagtaaagcggacattcgcaatccgctttcgctacttgctcatgaacgcagtcgctttgcgacctgcgttcagattacagcgtttcctgtaatcttcctgcaaattgcacactgcgcggtagacttttttatcctgttgcaattttgttacgtctatagtcggaatatattgaccaataagctgatcggcctttacttccctagaaggttttaagagaattgaggtatataaatagcttgcatccagaatctttccctccgcatcagaagctgcaagaacatacatctgcaatgcgaaaaatttaccattgattccacgaaagacacgtggtgcttttgcaccaagccggtgaagtatgttattcatttttactacctgaagatattgaaagaatccggtaatcgcccagattactcctacaacaataataatgttcgaaattgtataaattgatatatgtcccatatctttcaccagcctttttcaaaattctatttcgtgttttcctgttcttttcgtttttttgcttttccaactccaatcaggcagctcactgcaaaaaatgccataatacacattacacctatcatatatacctgagcaacactatctgccataatatgttctccttcctgttatttctttctgtgtgtcaatgtgtaaattaactgaccgcatgcacacagtacaagaattaatacgattgtaataataaaaagttttaaaaacatcctgtacctcctgtctagttctgctgctctctcatttttgcttctgcgatcttgtaatatcccggctcgccgtttttacttacaagattaccgatcacgagaattacgattgtcagaatgcatgttacatatgcattcggtaaagttacgccgattgcacctgcaacagctgcctgaataccggtaaaggaccataaaatgtttgcaatccaggaaactgccagtgctgcgattgcaacttttgaatttcttttccagaacagtccaaatgcaaccaggaagaataccggaattacccatgagaatacccatccgatcgcatcaagaatcgtcggtaatgcagttgatgtgatcattgcacataccgccagaatgacgatgaggattcttgtcacatttgttgcctgtttcggagttgctttcggattaatataaccaagataaatatcatttacccagatagtggacggtgttaaacttgtcattgcaaaggttgaaagaattgctgccagcaatgctgccagtaaaacagcactgatccagcctggtaacagatcaaccaacattgtcatagctgcttcttttgctccggctgccgcatattccggaatcgcacgtgctgccagaccaagaatgaccgcaaacacaccgaataaaccatttaatggagctgccagccataccgaacgacggatcgttttctcgtccttcgcactcatcatcgtctgcatcagcatctgggaaataccctgacagaatgtaactgcaataatctgacctactgcaaaggatataaacagttttgcatttccaaacacatttgtcataaatgattcttcacctgtaaatgtatccataataaagttaaagtttccacccggcatcttaaatgctactgctactgtcgcaataatcagaccaatatacatcacggttgcatttactacgtttacagcaccaagctctttcattcccgcaaaaacaacccagagaataccgataatcgcacctacaataatagaattctgaagcggccatcccgtcagtgcggtaataacaatacccataccctgacattccagaacaagtacaccccaaacctgtcctgccatcgtacaggaaatagccaatgccactccaggaccatacatatcttttaaaagttccggtactgtggtgataccaaaatggcgaacccactgtccggttgcaaaacaggctacaacaaccattaaaacatgcgccaggctgaaccagattgctattgcgcccattccgtaagacatttcaaatacacctgtaatatgtgccgaacctaaaaccgtcaacgcaatcgtcggtgccagtgtaataactcccatgttacgacctgccagaaggaagtctttatcatccccacttactgctgcagtatgggctttcttcttttctaccgcctttaaaactattgagacgattgctaccactgctatttcatatataataacagcaagaatcaatccaactttcattttctaccttcctctccttaacaagaaaatttttttaaagaattagcggactcagatagagtgctagaatatacacttatgattgattcaaacattgacacagaggagctacgccaattaatcaaatactttacctggatccgggattggatattctcccttcagaatattgtcacgttgaccggaccaccaggcaacattattgtctatcgcttttacaattaagtcccagtttccatctgccatatcgtaataatatgccagactgtcgttcactgcatcaatttcgcagaccttgccatcacggaagcgccagtattccacgacccgcatttcaacacgcatcccttctctgcgttcgccttccagaaagccagcgtatgcaccaattgggaattcaccggaccatataaattcccatactaacaagtcctctgtttctactgcagatttgtccgttatttgaacatttttccatccgtttccatctgcccggaaataacgcgacatggtttcaactgcaaattcaccatccatccacccctgtttttcaacaggattaatcatatggaattccggcgttctatgccgatagtcttcggtacaacaatccttgaatacatctttatctcctgcaaacattctgtttaccatggcttttgcaaattccaatttgcttgtagattctgttgctttgatgacttttacttcgttcattaaaaaccctccttaatgtgtggaatattccgataaatcgtaattgtgctttggtttaatcacaaaggccaaaatcatggcaagagcaccacacacaatgtataaaattcctccaacaacacactgtgtccttccatcaagtccaaagctattgaagataaatggggaaaggaatccaccaacgcctatcataaagctcacaatggatattgcctttgattgatttttatatggagtcaagctaccattctttgcataaatacttggcatcagaaacgcggatccggcccccagacaaatagcacctataataaagaccccggttgtaactgcattcgaagcgatcagtaacgcaacaccgccaagccccatgccaataaaaagggtgacatatttaatcttttggaatactttaccgaaaatcagaccaaaaataatggttccgacattaatgaacgcataaatcatgccgctctgagccggcgtagcaatctgttcactgataacaatcattgcaacgtttgtgatgaacacatagaagaaaatccaatgtaataaggcaaagattgaaaacaaccaaacagacccggggactttgacatccacgctttgattacccagaacttccttttcaaattccatcttggctttccggtcaggctccggaaggaaaataagaggtattgcgataaacgcaaaaccgagaagcactgcccagaagcaataataccattgaattcctgcaagccagcctccaatcagcgtaaacgctgccccaccaaggctattaaaggtatctcgcattcctgtcagcgtatgcttttcctttccatcaaagaaatccacaataaggtcaatagacaaaatagtacagaacccaactgcaaatccgagtatgattctgaaaatcagaattacataaatgtttgtatggaaaactgcaggtcctaaacctccaaccagcaacaacactgcactcagccatagaatcgatcttttccgcacatgagtgatgagtggcgtatagaaaaatggaaccacagacatgattaacggtggaaccgttgaaatcatgcttacgacagtataacttgcgtccggaaatatactcgcaatggttccaagtgcggacgtcgcagagcccataacattattaagcattgctacacaaagtattgccaacttaagtgtcgcgttgttttttcttgttctttcatgtacttgcatcttttttctcctttaaaaactatagtacctatatgtctcttttcacatcgatcctcctgtttacaatgaacagaaaaaccgctgttgctacgaataatatggctgttaaccacatttgccctcttgcatccaatccgatattattgaagatgtacggcgaaatgaagctgccgattcccagaaacagataggaaacagaaacggcttttgttgctccttcataacgaaccaaactggtattacgttccataattcccggagttacaattccactactgaaacccaatagaaacattgcaacaataaaactcccgatagaacgcgccatgaacgcagtaaacattgaaaccgccgccaccatcattgctagtggaagaatgatatatcccattttttcgagcaatttcccgaaaaaggcagaactgattactgtacccagcgtcataaaggagaaaatcaatcctacctgtgattgcgctgcgattccctcagtgattaacaccgttgatgcattggtaataattacataagcaaacagccagaataagcacagaaagaatccggtaatccaaacagaaaaaggagttttgaccttttggtgcgttatattttggttttctaccttccggttcgccaattttttctctcgcatcggttccggtaaaaaaataactggaaaaagaagaaagatgactgctacgagataggcaaaaaagcaataactccaatgatagcttgctaaatatcctcctaatgtctggaacagaatcccaccaaatccagtaaaagtagaagaccatccaaccattttggcacgttcgtttccttcaaaaaagtctacaatcaagtcgatgcacagcggcataaagatcccgcaagcgactccaaccagtaatctgaggagcaaaatgataaaaatattagaattgataaaggccggaccaacacctccaaccaagaacagcacagctgtaatgattagtatccaacgttttttaaacagctgaaccaacttgggataaaagattggcataatagccaacataagcgcaggcaaagttactatcatgctaatcaattgatacccggcattcgggaaagcctcggaaatggactgcaatgcaggtgtcgctgctcccattccattatcctgcaaagcaatcagcagaatcagtatctttagtacatttctgttaataccttttgtgtacaaagccatacctccttctacattttttcgtgttgttgattccttgaagtgtctgtaggacacagacatgtttactttatacatagtatatcatgttaaaaaaaacggcagactagtcataatttatagatttgtctgccgcctttttaatacctatgtttgtttgtaaaaactgttacctaacggcaagggcttaatgataaagcaaaacgtacgcactgtttgcttacattttcaatctcccattttgctcccattggaataacaacagcatcttcctgtctgttcatttccagtttttcaccatcaacagttgctacacactgaccattgtacatatatgcgatcacgtcagatttcggagtatccaatgtcagttttgcacccggatatacatcaacaatatggaattcctgtgtcggagaacctgttatttcttcatctgccagtgtaaagaaagttacgccttctttttctgttacttttgcatcatttacgttcttgatatacggctcagactgtttaaatcctcttggacagagtgtaacaaggaatttcagatttgctgttccgtccggatacatctcatggtcataattacctggtgtccacatgatatcgcctgctttgtaagcataacgttttccgttcatcatggaatatccttcaccttccagaatgtagaaaatgtgatctgccggaccgtggtttgcgattaatgcagctccgccatatgtaatctcacaggttgaaaaatactgatatgtccactctgttcctgccggatcatagcccatctttgccgcatttgcaaacggtctggaatgtgcgcctacgtgctgaaccggtgccatatctctcatatcataaaaattctgtacatatgctttaaagctcataataatatcccccatatcatcttaatctttttattcaatatttcctgttttgtttatctgttacctgttatctcttatatccacatgcatcttccagaacctgtgtcagaatagagaaatctttctctgctctgcctgttgcagaagctgcctgaagctgctgtcttgtgattgctgtagcaggcatggatacgccatactgttttgctgcatcaaacgcaagatccagatctttcatcatcagttttacagtaaatgccggtgcatattcgccctctgcgattaattttgctttgtatccgcaaagtggtgaacctgctgcagaacctgcaataacttcacagacctgagcaacatccagtcctgctttttcggataatacaactgcttctgcttcaatctgcatggtagatgcgatcattgtattgattgcaagtttcaatacaacagcctgctctgcatcgccaagatagaactggtttttgccaagaatttcaaaataaggaagcacaatatcataagtatccttatcgccggaagcaagaataccaagtgttccgttctgtgccagcatagtacttcctgtaaccggtccacggatcagtttacatcctgcgccttctactgcagcattcagttcctcggactcagccggcgcaacagtactcatgttgatcacgatttttcctgctgtcaatcctgcaactacaccatcctcgccctgtgttacggattttaatgtaggcccgtcagaaacacagatgaaaataatatcgcaattttcgccgatttcctttggtgttgccgcaagtttggcaccttttgctaccagttcatctgccttggatgcagtacgattccatactgtaagatcctttcctgcatcaagcagacgattgctcattggcttacccatgtttccaagtccaatgtaacctaattttgccatttttttatcctcctttttatatgaaggaactgttatacctttttctgattccccctgatataacagtccctgcgaatcattgaaacgttttgttttacgggaacatacagcctgcaaaaccacaggatacgatctcgtcagatgggaagtgtgtgatcacttcgtgtccggtttctgtaacaacgatttcttcctcgattcttgcggaaccggtaccgtcttctgacgggcaccaagtctcaattgcaaatgtcatacccggtttgaactctaatggattatccagtgagaacagacgggaaattgccggattctcccaaagtccaagtccgatgccatgtgcaaactgaagcaggaatgcctctttttcatcgttaaatccaagttcctgtgcggatggccatacttttgcaacatctgctgtcgtagctcccggtttgatctggtcaataccgtcacgaatccatttcagtgcttttgcatacgcttcttcctgtgcttttgtcggtcttccacaggagaatgtacggtaatagcaggtatgatatccgttatatacatttcctacatcaaagtaaaccagctcacccggtcggatcatacgattggatgttgtatggctgtgtggatttccacgctgaccggaaatacagtttacaaactctacagactcagctccccatttaaatagctgatgctggatcagtgctgccatctcattctcggttgcacccggacgaaggtttttcgcaacatcccagtatgcagcatcaaccattgctgctgagcatttcaataactgaatctcgtcatctgtcttaatcattctcgcattgaccataacagcctgaccatcaccaatcttgacacctgctctttccagctcctgatataatggaatatccacaatatcaattccaagcggctgatcaaaaacatcatgttttttcaggtagctgataatttcttctacttcctgctgtaccataccgacagaagccggaatggaacctctcatagaaccaactgcaggcatgatgttttccggacgaatccatgaaacacgctgtctcttggacgggcaggccggatcaaacagaatcggctgatcatatccgtcaatcaacaaacaatgacggttcattttatttctgttccactcgcctacatgtgtacctgtaatgtagcggatattgtcaaaatcatagcagagcaatgctccaaattctgactcatgtaaaaatttctttgctctttcgagtctctctgagtgaagtcgctcaaagttaatattatcctcgaaatcaaccccgttaaatcctgatcttggcataactttttctcctcctaatttaattttcggttatgtgttcttcatggctttatcctatccccccatcctgctataaggtcaatcacaaagtctccacaaaaataaacatatttttgcacagttaatcttgtctatttctttgttttttatacacattgcacaattttatgttttttaagctataacatcatgcaacgccaaaccttatagtcgactatagagttgtgataactaactgtatttccaaacaaaagagagcatccaacagcttacacacgccgtcagatgctctcttttccatgttcagactgattctctgctctatttttgttttataagtataatcctaatttctctgcatttttataatacagtttctctttttcttcttctgtcatcggacaggtttccagatatcccacacattcttccatatgctcaaatggataatctgttcccagcataatactgtcaatgccaattgcagctcgtgtacactcaaatgccggtatggatgtatttcctgaagtcgtcacaaaaatattctttccccaataagctcccatctgttccttatttttttgttttggattcggcagccagctaaaacgattctccattcgttccatcaagaatggaagtgcttctccaaaatgtcccaatacgactttcagatcagggatctcatcaaaaattccagacaggatcatgcgtacaatacttcccattgtatcaatcgtaaacccaagtcccggtgccgccattgcataaccatattcgttaaactttggctgatgtgatacagtcggatgtaaatatgcaaaaattccaagatctgcaacttttttccagaccggccagaattttttctgatccggatcaatacctgcaccataattggaatgcgtctgccacattacaaatccatagtctttcacacaatgttccagttcttccactgccgcatctacatccagtatcggtaagatggctgatcccagaaaccgtcccggaaattcctgcatcactttatataaagcatcatttgcctttttgcaggcaatgcggctttcttccggcggcaatgcctcaatacccggtgccagagaaatgactgctttttcaattccaagttcatccattatctttaatctgatatttgcaaaatccagcagattttcataaaatttatcctgacacatcgcgattccttccagccagtgaatcgtatttgtttccttatcccagtatggataatctccttttgccctggactgtaatgcctccacggaactaatgtcataaaaatggttctccagatcaatcttctttatcatcttattcttctcctttttcctactgcttattttttatttcctgcattgcagataaatcctgcgatcagatagatggcaggtacgatcattaccagtgccatatactgaacttctgctatttcatagataaatgtcatcttccacactccttctactgttcatcgtaatctttgataaacactccggcaattgttgctgcaactgccaaaatgacacatactccaattccttttaacataaacgctgcaaaccaactcatatttacgcctccaattccataatttgcatgcatacttatctgattccatgttcttccttccagagtatcatgtatcctcgctcaccttttgttactgcataggagatcactcctactacaatacaaacaatcaaaacaatataaatcagtggcagagtaatgccaagtacagatggtaacggtgtaaatgtataaagcaaaattacgatccacgaaacgcccatcgtcgctgctgcaccaacccggctctgtttccagaacagaccaaacaccaatgtgaaaaataacggggtaatccatgcaaaggaccagtttgcgctgttaatgatattcggaagtttggaagcaattgccattgcaacaacaccggtaataacaatcataatgcgtacaaccattgttttctgtttttctgatgcgtcccgatgtttcagaatataaatattatttaaaaatatggatccaagtgccatggtagtgattgcaaaagtagaaagaatcgctcctaaaaatgctgccagtaacagacatactacccacccaggcatcatctgtataataacctgtgtaccaattgcctgtcctgtcgctttcacaccttccggaagtgacagatttcctgtttctaccatatattttcctgccagtcccattgtcatggtaatcagtccgaaaataccatttaccggtgctgatacaagaacggcccgcttaatatctttttcacttcttgcagcaattgcagactgcacacccatctgtgaaacggattgtgcacaaagcaatgccagaatattatttagcgcaaatgagaaaaatactccaggtgcgccaaagaaatttaacatatgctcctgaccgctgctcataaaatatgcttcaaaatcgctccagccatttcccggaagtacatgtcctaaaataattgctgctgcgatcagaccaacatacattacgattacattcacaacattgaccataccgacttctttaattcctgctatgatcacataaaaaattccaatgattccaccgatgatcgctcccattgcaacagataccttaccggcagataatgcattaaacacagttccaagcccctgcgtttcgatcgtaagaataacaaatgtctgaagtgctattaccgcacacacaaataaccggattttctgaccatacatttttccaaataattccggcatggtggcaactttcagtcttcgtacccatcgcccggttccaagcgatatcatgatcagtggaaatatcgttgctatggaaaaccatgctacaaccgccccaagattaatcgcctgctgcatgataccaaaaatttttacagtacccagtaatgacaatgccagtgatgcccctaccacaggccatgtcatactctgtccccctgttgagaaatcgtctccggccgcagcctgtccgcccttattctttcgctctttcatcttaaggtatagcgcacagcctccgattgatacgatttcatacaaaattactaccgctatgattaccgaagtgttcatatcctgttttcctcctttccaagtcccatacagtcattacatttccttcctcctctctgtttttatattcttatttatgcaacttacatgccagtttctatttttactttttgactgggtattgcgcacgctttttcttttttgtgtcattttgtgccattttgtgccatttcgcgacttcctgacacatatttttcccaattatgacacattttggcacactctttctggcatatttcttgcaatgaactatactgacacttattttccatccacaacagaaggaagggtatttatatgttatctgaaaagtatgaaaaatatatcatttacgatcaaccgctgccggaagcagacaaggatatttcccctcaggtacttgaaagctggaaacggtcaaaaaatttccagcttccctggcaaaaactgaaagaatatcacttatcgtcccaggttctgcaggatattctttccaaaaaccagtttttgcttgaaacaggtcattcctatatgactaccttatatcagtatttgaaaaataccgggattctgctttccctgacagatgcacagggaacaatcattgattttatcggcgataatatcactctgtcagatattacagaacatacgaatctgtatcttggtgccatgcgcgatgaaaaacatgccggaactacggggatcgggctttgtcttgtcacccaatctccaacacagattcagggcgcggaacattattgccagacctttcatcattatatcggaaccgctgcaccaatccgcgatcgcaacggtcaaattattggtgttctcggttccgttgcccccattgaacaggccaaccagaattacattctggccatgatctgttccgctgctgacagcatcagtaaagaattatctatggagcagagcctcaatcatgtccgtaaagtcaaaaatcagctctccgccaccatagaagcaattcctagcgggatcctgtttacagacactctcggtgtcattttacagcacaatcggattgcctcacaattgcttgaatcctatcagaatctcaaaggcgaaaaaatagatcagcttatttttccaaaggcttccgggcaaaaaataacggatctgacacaaaatatacataatgtcgaatataatattatcggatactccaagcgtaagaaatccatttccatatcaacgtcctttgtatatgatctgcaccacaaggcaatcggaaaaatcattttattggatgaaacaaacaaactgcatcagctggccggaaaactcagcggactacatgccacttacacctttgattctatcataggttcttccccggaactgtcagccgcaatcacccttgcgcgcactgctgcggattcatcctcaaacgttctgattctgggggaaagtggaaccggcaaagaactgttcgctcaggcaatacacaatgccagcaatcgtgcagattttccttttgtagccattaactgtggctctttacccaaagaactaattgaaagcgagctgttcggttatgttccaggagccttcaccggtgcttccaaaaatggtcagcccggaaaatttgaactggctaatggcggaactatctttcttgacgaaattggcgatatgccacttgcactgcaggtatctctgttacgtgtcctgcagacaaaaacaattacacgcttaggagacacacacgaaagaaaaattgatgtacgggttatcactgccaccaatgttaacctgatggaagctgttcataaccagacatttcgaagtgatctttactaccggttaaatgttctttccatcgaagttcctcctctgtgcgagcgaaaaacagatattcccgatctaattcatcactttattgcagaaaaaagccggaatcttgagaaaaacgtcacaaaagtcagtcctcctgctatcgaagcactatgcagttatacatggcccggaaatatcagggaactggaaaacatcattgagcgtgctgtaaacctggcagaccaggattttattacaccggagcacctcccccgtcagatttttgaagatctgtcaaacacttcatccaacaactgtaaggattccaatgaaaaaccggaatcttcggtcctgacttatcctgcacagagcaaccttgacttatttctacaggaactgattcaggttcttcatgatgagaagggaaatatttcacaggcagctaaacattttaatatctccaaacggacactttatcggaaaataaataaatatcagattaatttgaaagattttcgtttttgaacattggcttcccggaaagttatgttaaggggagcagaaaaacttacctttgcagctaacaatcgcttgccaaggaaagtttttccgctcccttatctctgttatgataccaatatctatcattttattttaagattttgtaaaacgaaaaaaaatgcacatcgtatggcacgtagtgcagggtgacgtaaaaaatttacgatattcactgtgtaacttaagaactccggcaattttttctcaaggagcgattgttagcgactgagacaaaattgccggagttcttattaaaacctaatatagtaaatttttaagtcaccctaaaacaagaaactattgttcacgttcccgtagtttttcgatcaacgtaaacacctccggatgccgttctttcaaatgttcatccagcacatgtttccgctcccggaagcgctctgccagttccggatgttcttttgcgatccgttcatggatttcctgacggtgctgctcgatgcgcaatgccagcgtctgctcgtcttttccggaaatattaacgatttcttttaagtgttcttccagatgctccagccactcatccatatcccattcatccatatgagaccagcttccgtgtaataattcttccacatcttttgtttctttcaggtgctcgatctgccgtatgatctggcgctccatctctgcttctgcatcagcaccaaaagcccatacaaattcctgcacgcggttgtccgcacgcttacgcgatgcactgcgctcgatattttccacaccgccttccagcggatatggacgattataaccgatatctttcaacgcaatatgtatcgtccggcggacatttccgttttcgatcaaatgtcccagacctaattttcgcatctgggtattcaatccggaaatatgctctgtaacgtaaaaacggattcctttttccttcagtgattcactcagcagattcaggcggtctgctgccgtaatatccatgcttccgataccgctggcatccagaatcaccgcttttgtatcttctttcagcgctgcctcaatttcccgctgcaatacggaaatatttgcaaaaaacaggttgctgctgaaacggtaaatgattacaccggatatcggatggatctgctgtccttctttcagatcccgaaaatgcttatgacctggttgaattccaaggaagcaggttgccggttttgctgttcggatgatcatttccgtaaaagataaaataatgccgatcagtacgccgttgatggttccaaggaataacacaccgaaaaatgcccccagaaaaataaaacattctgtccgactgactttccagagtcgtggtatcaattcaaattctgttgcgccaagcagtgcagagatcacgattgcggttaaaaccggaattggaagatagccgataaatccagtacaaaacagcaacagaatgatcatggaaccacctgctaccagcccagtcaactgtgtttttgcctgatactgttcacccatggcagttctcgatacggaaccattgatcggacaacatccggtaaaggctgccgcaaagtttccaagggaaaatgccagaatttcctgattatcattgatctgatatctgtttttctgtgcaaagctgttttccgccagcaacgtttccgccatgatcacgactgccaccgacaaactgatggtaactgcttcttttaatggaactgctgaaaaattcggcagactccatttcggaagtcccggatcaactgctgccagtgtttgaattccccagtcgcgcaatggaagtaccgctgtcaataccgctccagctgccataagcacaactgccatcgggaatttcggcataatttttttcgatagtaataaaatggcaagggcaatcacgccaaggataacggatggaacactgatcgtttttgctgtttctgcaatatgctctgccagttccagaaattctccgacacctgccgttccgcccatcagtttcggtacctgcattagaatgatcgtggtacagatacctgtgataaatccgcccatgactggtgcagagatataattgaccagttttccggcttttaataaagaaaatatcagcagccacaatgccacgaaaaaggtcagcatcggaactgccaccagtgcttctgtcgaaccggctgtgatattcaatcctgccaacgccgatccaatcagtgccgccggagccgcatccaccccaaagataaactgcggtgatgtagaaaacagtgcaaagatcaaaattggaaagacggatccatatagtccgtacactgcaggtaagcccgcaatctgtgcatatcccatggaaatcgggatggaaactgccataatgatcagtcctgccagaatgtcctttccaagatttttcttatcataatttcgaagtgtatgtgcaaatttcataagtcatcctaccgatttctgccataaaaatacgttgcaaaaaatatcaccgatgcaatgatcacgatcattggaccagtagctacatttgtataataagaaataaacaatcctacaattccagaaaacattgagaacaaaatcgaaaagaaatggtactctctcagattttctgaaatattccggctggatgccgctggcaggatcagcagcgcattgatgatcagaataccaacccatttaatggacagcattaccatcaaagcaataaatacggaaaacagattttcaatcaaccgaatccgaatatgtttactttttgccagtgtccggtgcagactgattgcctgtagacggttatagcacacgatccagaatacaatggtggcaagaaatatcaaaaacagatacacgatctccctgcgtgtaatactcaaaatatcgcccactaacagactggaatatttactgaagtttccgccacgggacaagattgccagaccaatggcgatacagcaggaagaaaacacggaaatgatcgtatccgtggatgctgtactcttgcttttgatccagtttaacaataacgcaaaggcaataccgaagatcaccatggacagattcgtatccgggattccaaatactactccgaccgcaattcccgtcaaagctgaatgtcccagcgcatcagagaaaaacgccatcttattgttgacgatcattgttcccaatataccaaacaacggtgtaatgatcagtaccgcaataaatgcactgaccataaagtcatactgaaataaggaggtaattccactcatttactcttcctccttccataaaccatggctgtgtttcggcatggtgatctcttttttctgctgttctttcacctgacggctcggtttgtagttttccagatcaaatctgccaaacacctgtcgaaattcttcgctctcgtacacctgacgcacggttccctgttttttcacggttccatcaatcagaataacctgatctgcgtactgtgccacataatccagatcatgtgaaatcagaataatagccagatcataatgcttcttcagctcggaaatcgtatggtaaaacagatccataccgttctggtcaataccggaaaccggctcatccaaaaggagcaggttcggctcatccataaccgccatggacagcagtacacgctgcaattcaccaccagatagattgcacacctgtttatcaatcagatcttctgccttaaaaattgccagatgttcttttatttttgcatatacttttttgctctttttccagaaaaccggataacggctctggtagcttgcgatcatatcatacacactgatcggtgtctttttttcgatattcagcgactgcggcacataaccgatcttcattttctgcatgtgaccgttttcgcggtctttgaactcaatagttccgctgtgcggaatatcaccaagaatcgccttgatcagcgttgattttcccgcaccgttttttccgataacggctgccagtgttccacagtggatatgcaaatttacatgctgcaaaatcgtatggtcaccgatggtcacaccgatatcctgcattttgatacaatgcagaccacagggctgtataatttttttcatcattggaatgcctcttttaattgttcaatattgcttctcatgccttccagataactgtctgctgaatagtccccccgtgtcagggtatccagataaacgacttttacgccactttgcttcgccaccatttctcccatatccgtgccatacagttcttccgcaagcacaacagaaacatgattatcctcaatggaatgcagaatatcagctacttcaccggcgctaacctgtcgttcttcatccaggttcatttctcctgccagttgcaatccgtattcctgcacgatatattcgtatgcctcgtggaaaatcaccactggctgtgatgcgatctgtgacgcaagttctgctgcctcctgctgcaattcctgcacttttccctgataggtctgtgcatttttggcatactgctccgcatgggcgctgtcagcttcggaaagtccattacaaatgttctgtacctgaatctgataatccgctaagttcatccatacatgcgcattttcatccccatgagaatgctcggaatggtcatgatcatcatggtcagcatcctcattggaacttaaatcgttatgagattcccctgttccttctgcggactcaagtaaatcaatgccatcacaagcctgaacaatcttcagatccggataggattctgccacatcggataaaaagctctcgatgccaccgccatttacgataaacacatctgctttggacaacagtttcatatccgccgccgtgagctgataatcatgcagacagccggtttgtggttcgctcaaattttccagcgtcacaccttccacatcaccaatgacattttctgctgcaacgtacattggataaaaagatgtcaccaccagcagatcttcgtctttcgcctgttccttcttctgctccgccctgacataagccatggtcaacacacttccaacaaacaggatcatcgccagcaaaactgccgtaaatacatatttattcttcatttgtctctcctgaagatgctaaaatctggtccaccagatcccagatttcctctcttccctgctttgtctcagccgaaaatggaatcaggatggctcctttttctgtgttcagtcccagacggatcacttttaactgtttctgcagctggctgcgtttgatcttatccgcctttgtggcaatgatgatcgggtggaatccctgatataccatccactcgtacatcattttgtcatttgcggaaggctcatgacggatatccaccagcaaaaatacagcacgcagctgttcggaactgttcagataattctcgatcatggtgccccatttttctttttccttctgagatacttttgcaaaaccatatcccggaagatcagtcagatacagttcgtcattgacattgtaaaaattaatggtctgtgtcttacccggctgaccggaagtacgcgccagtgccttgcggttcatcaatgcattgatcagggatgattttcccacgtttgattttcctgcaaaggcaatttccggcttcgtatttttcggtaatttgctggtataaccacataccgtttccagtgaaacatttttaatgatcattgttttctccattcattgctattttcagcacatcttccatttttttcacgtaacaaatctgcagaccttctttgatttcctctgaaatctctgccacgtccgcttcattctgcgccggaacacatacggtacggattccggctactttcgctgccagcagtttttccttcaagccaccaattggcagtacacgaccacgcagtgtaatttctccggtcatcgccacatccgcacgcaccggtttctttgtgatggcagacagcattgccgttgccatggtaataccggcagacggaccgtcttttggtaccgctccttccggaatatgaatgtgaatatcatgttttgtaaaaaactcttccggaatgtcatactgctcgcctacagaacggatataactgatacccgcctgtgcagactctttcatcacatcgccaagctgaccggtcagtttaaattcaccttttcccggcattacatttacttcgatctgaagagtatctccgcccacactggtccatgccagtccgcgcacaataccgatttcatcctgatcgttgatgcgatccacatggaaacgctcttttccaagatagttctccaactgatccttttctacatgcactgcggtacagtttccttcataaatttctctggctgcttttctgcagatctcacccagttttcgctccagattacgcacaccagcttctctggtgtatccgctgataacctgatgcatcgcctcatcagtaatcgtaagctgctctgtcgacagaccgtttttctctttctgtttttccagcagatgttcttttgcgatatgcattttctcattttcggtataactggacacttcaatcagttccatacgatccagcaacggacgcggaatcgtatgtacatcgttggctgtcgcaataaacagcacttcggataaatccactggcatatctacataatgatcgataaacttggaattttgctctgaatccagtacttcaagcatggcagaagacggatcgcccttgtaatcgctgctcattttatcgatctcatccagcagcatcagcggatttttcacgcccgcctgacggattccctgaatcagtcgtcccggcatggcacctacataagtacggcggtgtccgcggatttccgcttcatctttcacgccgcccagacaaatgcgtacatattttttatccagtgcgcgggcaacggaacgggcaatacttgtttttccggttccaggaggtcccaccagacagatgatcgggctctcaccgctcttggtcagtccacgaactgccagaaattccaacacacgctcttttactttttccagaccataatgatcatcattcaaaatttgctctgcatttttcagatcggtattatcctctgattttttattccatggaagatccagtaacgtctcgatataaccgcgcacaacgctgccctcggacggactgtttgccacatttttaaaacgggcaatttcttttcgaatccgttctttgacagactcatctgcttccagtttttccagagcttcctcaaactgcttgatatcggaggtggtattatcctctccaagttcctcccggatgactttcatttcttcccgaagaatgtactctttctgatttttatctacccgctctttgactttttcctgcagttcatttttgatctgcatgatgtttgtctcatacagcagaatctgcatcaatgcttcgtactgctctgtcacggattctgtctctaataatttctgtcgtttttcaaaactgatcggcagatttccggctacgatccggataaagctatgcagttcatttaatccatctgcctgctttttcaattctttcccgattttcggattggaagcacaatatttcagcaattcttcctgcaatgcacgcagcattgcttcctctacttccggtgcaagcacttctttttcttcgctttcctctgccagcacaacctgtgctttcagcaattcatcattgtctataaaataagccagctcggctttttctttcgcctcaacgattacccgcacgacatgattctgcattttgacgatctgtttgatctctgcaatgacaccgattgcatacacatcatcctgtgtcgcatgctcggtctgcatatctttctgtgttaccagaaaaatgcagttgtctccgttcattgcctcttccactgcatgaatggatttccgggcactgatatcaaaatgggataccacccccggcagcaatacagaaccacgcaggatcacggctggtaattctttcaaaatttcacccatgttattcctctctctatttccagactttcccaaaagtctttgttacattccaagcattttcttatctcgcacatctcttttcttccaattatgtactataacgaaaatgctacaaggggcggcgccatatatctgaccccgcccttgcaaaacggaaaacactttttagctgtatttccctctttttatttctcagtttcaatcgcaccattacgatactcaaggattgcttctccttttccttctaccatatcttttgtaatcgtgcatttcttaatatttttatcagacggaatccgatacatcagatccatcatgacattttccatgatggcacgcagaccacgcgcacctgtcttccggttgatggtcagatctgccactgcatccaaagcatcatcctcaaaaacaagttctacctcgtctaaggagaacagtttctgatactgttttaacaaagagtttttcggctcttttaagatgcggatcagatcctcacgctccagtgcttccagagaaaccgtgatcggcacacgtcccataaactccgggatcataccgaattttacaaaatcctgcggaagcgcgtctttcagaagttcactgatatttttatcattctctcctgccagttctgcattaaatccaatggaaccacgatccatacggttttcgataatacgatcgatgccttcgaaggcaccaccacagataaacagaatgttcgtggtatcgatcgggatcagttcctgctgtggatgctttctgcccccctgtggtggaacagacgcaatggttccttccagaatctttaacaatgcctgctgtacaccttcaccggaaacgtctcttgtgatagacgcattttcggatttacgtgtgatcttatcaatctcatcaatataaatgatgccgtattctgctttagacacatcataatctgctgcctgaatgatcttcagcagaatattttccacatcctcaccgacatatccggcttctgtcaatgtggtcgcatctgcgattgcgaacggcacattcaggattttcgctaatgtctgcgccagtaatgtcttaccggaacctgtcggtccaagcatcaggatattacttttctgcagttctacatccagatccggctctgccaaaattcgtttgtaatgattgtataccgctacggataatactttttttgcctcatcctgaccaatgacatagtcatccagaaatgccttgatttcttccggtgtcagcaagttaatatccatatggtcattttcttcgtaatcctgcatttcctcttccagaatctcgttgcaggtctcgatacactcatcacagatatagatgcctgccggtcccgcgatcagtttgtgtacctgatcctgggttttattacaaaaagagcaacgtattttatcgccctgatttattcttcctgccattcaatcttactcccacgctacattttactgtctgtttgtgattacggcatcaatcaaaccgtaagtttttgcttcttctgcagtcatatagttatcacgctcagtatctgcagctactacttcgtaaggctggcctgtattttcagataaaatacggtttaagcgttcttttgtcttcaggatgttctctgctacgatctgaatatccgtagcctgtccttttgctccgccggacggctgatggatcatgatctcagcattcggaagtgcgtaacgttttccttttgttccgcctgccagtaagaatgctcccatgcttgctgccataccgatacagattgtggaaacatcgcatttgatgtactgcatcgtatcgtaaatagccagaccacaggaaaccactccacccggagagttgatatataactgaatatctttgcccggatcttcagactcaaggaacagaagctgtgctacgatcaagcttgctgttgtctcatttacttcttctcccaggaaaatgattctatcttttaacaatctggaataaatatcataattccgctcgcctctgcttgtctgctcaacgacgtaaggtactaaactcatattgctacctcctactattttttattttctttcagaattttcacttctacacatatatttttatcaatcacgattattctgaaaaaacatgaaaagcagaccggcctcgccggcacgatctgcttttgtattattcactttgtgatacaggacttaattttcctgccctgtcagagaattattcagctgtttctgcctctgctgcttcagcttctttctctttttttgtttttgcttttgcacgaggttttacagattctgtgatcagctcaactgctttctgaactgccagatcctgtttcatgttctctttctcatcctcgcccatgtactctttgagcttgtcagcttccatgttgtacattttagccattttctcgatctcagcatctacatcttcatctgtgatctcgatgttctcttcttttgcaatctgctcaagaacaaggctgctcttgatacgtgtgatagcgtccggacgaacctgctcttttaactggtcaattgtcagacctgagaactgaaggtactgatccatggacagtccctgctgtgccatctgctgtgcgaactggttgatcatgttctcgcactgtgtatcgatcattgcatccggaagttccattgtggatttgtctacgatcttatcgattgcttcatcctgatatgcacgtttgatctcgttctgttttttctcttctaatttagcttttacatcagctttgtactcatcaacggtatcgaactcagatacatcctgaacgaactcgtcatcaagctccggaatctcttttgctttgatctcatgaattttaactttgaatgtagcttcttttccagcgagatcttctgcatgatactcttctgggaatgtaacgtttacatctacatcatcaccgatgtttttaccaatcagctgctcttcaaatcccggaatgaagcttccagaaccgatttctaacggatgattctcaccttttccgccttcaaatgcaacaccgtctacaaatccttcgaaatcaattactgctgtatcgccgttctcgattgcacgatcctcaacgttgatgattcttgcatttttctcaagctctttgttgatttctgctgttacatcttcatctgctactgttccgtctactttagtaactgttacaccaatatattttccaagtgttacttccggttttgtagcaacttctgctgtgaagataaacggtttgcctttctcgatctgagtaatatcaacaaccggtctggatacgatatcctctccacactcttttgctgcatcagcatatgcctgcggaattaatgcgtttgctgcgtcttcataaaatacgcctgcgccatacattttctctaccatagctctcggaacttttcctttacggaatcctggcatgctgatatttttcttctgtctgttatatgcttcctgaagtgctttctccagttcttctgctgcaacttcaatggtaagctttactgtatttttttctaacttttccacctgtacgctcattctgacaatttcctcctttatatatatgtagtcacgtgtaatttctttgaaaaaggtatacttcaactacttacagtcatttttgaattataacacactggttttataattgcaagtgatattccatttgcgctgttagtgtttcgaacattggttcgtttttccagttgcattctctcattttttgtgttatgctatttttgcaatcgaacatgtgttctgcattttatttaaaaataatactatagcacataaatattgtcaatatagaaaacacacagacattgcctcaaactttccaaacatgaagcactgaggtaaataactgcggatttgaggtgaaacagattatggaactttatgatacaacactttctttacacgaaaaactggaaatattatccgatgccgcaaaatacgatgttgcctgtacttccagtggcattgaccgccgtggcaaaaaagggtatctcggcaattcctgcgctgccggaatctgccatagctttgccggtgatggccgctgtatctctctgctaaaaattttacagagcaacgactgcatctataattgtaaatattgtctgagccgtgcagacaatgactgccgccgtgccaccttcaccccggaagaaatctgtacgctggtgattgaattttataaacgcaactacattgaagggctgtttttaagttctgcggtatgcaaaaatccaacccacacgatggagctgatgtatcagacactttacctgcttcgtaacaaatattgcttcaatggttatatccatgtaaaagcgattccacacgctcccgatgaacttctggaacagacaggctatctggctgaccgtatgagcatcaatctggaacttccaaccgccgaaggactttccatgctggcaccgcagaaaacacgcgcctccattctgactcccatgcgcagtatgcagcagcgaatcagcggatatcggcttgctattgggaaaagtgctgccatggagcgtcatcggggtaaccgttatctggatcacagtatctttacagatgctgtgcatattggtaattcgtccgcgcatactaactcacgcaacactgctgatcttacacacattaccccagatatgcatgcgctgctgacagaaaacactcccatttccgttcactcacagcaccgcttttctgaccataataaaactgatttagatgcattttcgatatcgtccacatcggctgcttctccccagaacatgtacggtcatccggatcgtccttttgcccctgccggacagagtacccagatgatcatcggagcaaccggtgaaacagattttgaaattttatctaccacgcaggcactttatcaaaattttgacctgaaacgtgttttttactccgcttatattccattaaatgaagatgccctgcttcctgccattgggacactgccaccgctgctgcgtgaacatcggctttatcaggcagactggttactgcgctattatggatttcatgcttccgaactgctgaccccggatcgaccaaatttcaatctggcacttgacccgaaatgtgattgggcgttacgccatctggaacagtttccggtagaagttgcctgtgcagattactctacgctcatgcgtgtacctggcattggtgcaaaatcagcactgcgtattctgaaagcccgccggctcggtccgctgtcctttgacagtatccaaaaaatgggtgttgtcctgaaacgtgcccaatactttattacctgtaacggaaaaatgcatgtaccgatccgcctggacgaaagttttattacccgacagcttacggcaaccgatgccaaagccaattatatgattgccgcttctggagaaatttatgaacagctatctctattttgattattatggaggcaatgatgacgatctatacttgtgaaaatacatttgaagcaatgatgacgtgtatctatgatgcatgggcatccaaagaaggacatcagaatatccgtctgaaagcagaaccagtaggcgatatggaattattctgtgaataccgcccgattcagacagatacggaaaaagcgaagaaagttgtccgttccatccagaaaaaactgtctttctccgcatatattatgatttaccgttgtgctatgtccgaacatccggataagctcgaccggatctatcgcttcctgcttctgggattcgcttatcctgataaaatcacggatatgctgcagcatccttatgtcagtgccgtatttgaattaagccgaagcgtcatgaatgaagctcatatattccgggaaattgttcgtttccaggcgcttcctgacggagttctggtcgcacatattgaaccaaagtcgaatattctaaccctgctctatcctgcttttgatgatcggatgccttcggaaaactggctcattatagatgatacccgttccattgcagccattcattctgccgatcaggaaacttatcttactaccttgtctacagatgagttgcagcgattaaaacataccgaagatatgacagatccatttatcgatatgtggaaatcattttttcatcatattgaaattgcagagcggaaaaatccaagttgtcagcgtacgcatttaccaatttggtaccggaaacatgcaaccgaatttcttgattaaggtggcttaaaatttactatttaagtcttaataagaactcctgctattttttcttggcaaatgataaaagtagaatggtataaattgagaaaagtaaattaagcgccagtcaggcaatctttcctcagcgagcgattgttagccgcagaggtaagattgatgactggcgctttcacaacctaaatcttgaccacaaaagaagctattacagacttctccatgcagtttcaagtgcgatctcaatcatctcatcaaaggactcctgacgctctaaagcagtcagttcctcatgacggaacatatgatcagaaatagacagaatacttaaagctttcttatgagaagctactgcttcccagtaaattcctgctgtctccatttctacacagagcattccaagatcacggcacagtgacggaatattggaatctgcattgtagaatacatctgttgtaaatacatttccaacttttacgcttgcttctctctcattgcagatatcaactgcatctttcagcagatcaaaatcagcagtcggagcaagtgttcccgggaaaccatactgtacatcaaatttagagtttgtagatgcgctcatagcgataacaacgtcacgtactttcatatcatcacgaagtgcacctgcagaacctacacgaatgatagaatctacatcaaagaagttatacagttcatgtgcgtataatgtcatagacggaatacccataccgcttcccataacagagatgcgttttcctttatatgtacctgtatatccgtacatattacgaacagtgttgaataattccggattctccagatatttttctgcaatatattttgcgcgcagcggatctcctggcatcaggactgcttttgcaactttttccttatctgcaacgatgcatgcggaaggtgttgaaatcataattgtttcctccttatacaaactttattttcgtttattaccttacacactataagggatgaaaaataaattgtcaaacaaaaagtatacacgattttattccttcgcacacttttatattttcacgattatttatctgagaaacttatttttccacgtaagcaacatgtaatccatcaccagtacatacagattcatattgattccatgttcccatttcgtgtccgatcaaaacattatctatttttccatctgcatatttcaaaatatcctgcatggttagaattgactgataagcacttcctattccaaatccatttggcatagaaataccatcatcgtttcctcccataatatttccttttacataagcacaatcgcctaccatgacatatttttttcctgccgtttctacaatcactatattacttgcaaaagaatgtcccatttgtcctactctgatactaatacctggaaacaaattatctacctctccatctaataaaactaagcgattttcttttatcaaatttatgcagttttctatggacacattagacatggaaacctttaatgtattgtacttatacggaagacacattgtcttaatccaattacaaagttcatctgattgtatataaaactttgcgtttggaaataaatttacacctcccatgtgatcccaatgcgcatgcgttaaaataacatattgtacatcttctggctctattccaattttacgaagtactttcgctggacttcggtattgtgtaatattcattccttcagctaatttccgatgttcttcgtagctatcatcataaccagtgtcaattacaataattccagcctcgcctttaattacatttattgtataagtaacatccgtctgttcaccatttccataataacctgaaaatacaaatgtgttagaaaaccctctttgcactgcatattctaataccgtaatagaatattttctttccatttttatttcaccctttattttctaaatattatatcctccaacagaaaatctgactccaacctcctcaaaaatcttttttattcgctgcatatcttctgattcttgtggttgcaaatcctcggtcggatatctttttccaattgtttcatacttggatgctccaaaattatggtatggaagcacatttaataacggttttccacgcaattctttcacaaactttgctgtatcgcgtacgtttatatcatcatcgtttaatgttggaatcaacggtaaacgtataatcaactgttttccatgtttttcacaccactgagctgtcttcactatattttcaagaattatttcattgcctactcctgtaagtgctttatgtttttcccgattcatacatttgcaatccaaaaaaacaagctttgtgtaaccaagaattcgttttaaatcttcccattttccatagccacttgtctcaatagcagtgtgaataccataataaacacattttttcaaaatctcgccgacaaagtccgcctgacctaatatttcaccgccagataacgtaacaccgccgccactacgacgataaaacattctatcatcaagaacagcttttacgacttcctcaactgttttttctatgccaacctgagcgcgtgcctgaaaattacatacctgtacacaacgcaggcactgtctgcatttttcaaatttctggacaacaacactttttttttcattccatgtaatcgcattttcaggacatatttgaatacattttccacaccccacgcatttctgagctttataagaaagctgtattctcttttccaacccatatgcattactgcaccatttacagcgcaatggacatcctttcacaaatacattggtacggattcccggtccgtcctccaacatataatgactgatatcaaaaatagtacctgtcatatatggtgctccgtacgattaatgatatcatcctgaacttcttttccaagatctgtaaaatatacactatatccagctactcggaccatcaatgtcggatatttttccggatgtttttgtgcatccagaagtaccttcttgtcctgacaattaaactgcatatgatgaatatgctcatcacacaacgctgtcctgatcaatgacgccatcttgttgattccctgatatttataatgttcttcttccggatctggaagtaatgcatctataccaactttttttacatcatagcatttcatgaataatcaccccttcttattctgcaattaaatcagttttgctgatccacatattcaaaattgttccattcgtgcatgcactgtgattaattttaccatatgactgtatcgctgccagcggaccattcacatccatatgctgttctgctgagagtgtatctgctaatggggttaaagcttttcgtcctgacggaagtgcccaacacatctctcccattgctacatttgtctgcgttggctgaactcctgctgaagaatagtttccggctcttccacacttcaatgttgcacaatattctgcacaatcctgcaaagctttcgatgtaagcatatcaacctcatcgatattatttccatattttggtacattgaggcacatctgacgaatttcctcatatccttcaaaatccgcttcaacagctttcaacagttcatccatagaaatcactttatcatcatagacaagttttttcactacttcaagggaatctcccatatctgcaacaccggtaagcatataatgcggacctgaatttaacatagctccaccggcaacaacatcgatacctttttcaattgcattcgttgccatcatagtaaaaagtggcatctgatgttcttctgccagcaaacgttccgctacaagcatatgctcctgacacagattaatctgatacttgtactgacgcatgaatgcttcataaaattcatcgaatgttttaaacgcacgcggatcaccactctcacagccaattcttgtaccggctccatatcccggacacccttcaggcaaaataccatttgtcagagtcagactgactgtatttccaagatttgtaatatttgcatttgtatgtccataacagtaaccttcaatcttcggttccacacagcctaccgttgttgcacgctcacgaatcaattttaacggaagattatttgccccattcagaccggcaccgttatactgaatcatgttataaacactgtcgatgtcaaagaatgacggatgccccagtccttctgctgcaagttttaccgcttccatcaggaacgattccggtgtcttacttccaatatgtacatgtaccgccggtgctgtggtacgtgtgtcacgtgcacttctcagacaaatataggacaataaattcacagcatcatttccatttgcatcataaccgccaacactatagccaccagtccaacggtaatagccaccaaagcaatgcgccaatccttccggaagcagccacggaatgttacagcatttaatattatattcttccatccattccaaagcactctctaccgtttctacaccactctgaagatccttctccaaatatggccataacagctgatccaaacgtcccacattgatacacggtccagatgcttccacattcagcatcattgtattaagccatacggcgtgtaatgcttctgcaaaattttccggaatatcccaacaaattttctctgctcgttttccggcagttcttaattcctctgcacgttcaggatctgcttccttctctgcctgtgcgtctgctgcctgatgcaatcgaataccataatcgcgaattcccttgcagacttccatcattccaatataaaaatcctgttttctgacattatccggatcgatcaaatccagatctgataataacttttcgcatttttcataatatccacgatatccgattttaaaaagttcatgatagtccggtacaaaatgagaacccggatttgatatatagttactgcaatctacataaccggaagataacaaaacatctggttctcttgtctgtgcccggaattttgaagttaatgtcttatccttccaatatggaatatgttcattttttaattcttctttatcttttgcgtcaattttccagggatcaaataatctggtttcaaatgtatcaaaatctgactccagccaatgtgcatgtgactcaatactgaaattattacatcgtatttttcccccctgccatccaagcagccgttctcccggttcaatatgaattggtaatgtccgatatacttctgccatagcaaaatatcttttgcgaatctgagattcgctttcatgggttttaaaatatttcgtaaacactcgcgtcctctgcatttccagattcggtcttgccgcatgaagaattccatttaatttgcggatacgttcggtacagcctacctctgtaacctgcccggtacgcatttccataccgcccttacttcctacttctattatcttttccattgttttccctcttttccttttatccgatatgctgcggtgaaactgatcattttatctatccgtctttatgatcagtttcgccattcagcctggacttcgctcattaagccttcttctcagcacccgcttttgcaacaattgcatataaaacagctgtaacgatcaatactaaaaatgtactcaatttaatagccggaactaatttcagtgcaaaggaaaatgccagaccaattatgatacaaataaccggacgcgcattaacaaccggaagatctttttcctcttttatatcaagttttcctttatgaacaatatagaaatctgtaagcattacagctactaaaggtgccatgattgttccaattgcagttacaattgtattaataaaatcaacgcctggtccatacataatcacaaacgaaatcactcctgcaactaatggaataataattgcaaaccattttctggtagtattaaacactgctgcaaatgaattactgtacatataatcgcatgccggtgttgtatttccctgtgcgatcataacgaaaatacttccgatcaggaaaattgctccgcccagagatgcacagatatctgcaagtgtatgtactcctgtacccataaatccaacctgacctactaaaaagcagagtaatacaaatccagatccgcaaagtgctgcaataataacagattttttatttttggcatctgtagtcagatcaattgctcctacataacctgccatccacataccaaccatagtctgtgcaatcgttcctattgtgtaagtagtttctgttggctgatatgccataaggccttccagtccaccggcatgtctgacagatacaatataaataataacaaacagaacaatggcgattggaatactgatattagaaatcaatttaacaccatccattccgtaaacaccaccaataatcgtaacaacaagtaaaattaccattgccagtgcaaatccaaaattcttatgtccttccggaaagatattatatactgcctgagctgcattaaataaatcgaagcaagcccaaaatgccatacaaaatgctactgcaaatgaaaaaatccgaaaaccttgtcttccaaacatctgcttccagactgcatcttttttcaatccggttttatagccaatcattgtcgatagtgcaattaacactgctccaatcacaaatcccagagccatacctgccagtcccgtggtgaattttgctccttgtcccaccagacctcctgtcggcacggctgtaatactgcaaaagtaagccataaatacggcacccaatgccactggtcctattttttttgtcttttccatagtttttctcccttctttggttctaatttttatacttttataattcgcaaattccatgccacttttccaagcaaaaacttttctgtatattttatccaaaaaatcctttctattttcacactacaattctttcatttagtaattatgcttatttctactacgtttgtttttcatatgtatctatatgcaagaaaaaagagtgaaaaaacgcaccttatatgtgaattttttcactctcgaatatttacttaatcatactactctatctcatatcttttacactttttcaggaaagtggttctttcacatcctagcgcctctgatgcctttttcttatttccttccttaagaatagcattctgaatcatttgcttttcaaattgttctacagcctcttttaacgtatatttttctttctgatctgtcgatacacatattccagttactccaagcactttctgaatctccgaacatgtaatccttccatctttcccaagaatcaccaaacgttccatcatatttctcaattcccgaatatttccaggccaatcataatggcgtaataactgcattgcatcagcttctatcaaagtaatttttttatatttctcatcaaactcttctaaaaatcttcccaccagaaaaggaatatcctcggatctgtctcgcagtggtggtaactctaacggcaaaatatttaatctgtaatataaatcttctctgaaatttccatttcgtatttcctgaagcagattacgattcgttgctgcaataacacgcacatttaactttattgcctgttgaccaccaactcgatttacttcattttcctgtaaaactctaagcaattttgcctgtacctgaaaaggaagttctccgatttcatccagtaaaatagttcccccatctgcctgctcaaatgcgcctttttttcctccacgctttgctcctgtaaatgctccttcctcatatccgaacaattctgattccaacaaatcctgtggaatcgctgcacaattgacttttatgtaagtattatctgcacgacaactgtatttcacaatcactttggaaagaagttcttttcctgttccggtttctcctgtaatcagaacacttacatctgtctgggctaccgttttcgccaaagaaatcaaatcccgcattacatcactagtatataaaatttcctcctcatcagcagtatgtactgacactgatccggcttcatctgtactatcaggaatctctcctttttgtaactgtttcagacgattttccatctccataattgacataacatcccagtctgtcgttattgcatatcttaattttccgttttcatccttcactggaatccctgccacaaatccacgataatctgtagataccacatatccaattgcattgattggtttttcttcttttaacattctcggaatgacatcacactgaatgacgttttctttttgcaattcaaaaatcgtttttccaagaatatactccttctttaacccagtacgttcttcataagatggattaacataacaaacataccctctatcatccgtgacaaacagtgtcgtattcagatgattacaaatcaattggaaatctatctgcgtttttttataatttgcaaccatttcaaccatttgttctgtcaattccaatatatctttttttacattatccgaattagttaatattatttgaaactgctctaattttctttccaaatcttctatacataaaactttttccataccaactttcctcttcgcatttcatacatacttcactgtaagttgtttctattatactaattccaaacacattgtgcaatgaagtcactacttattctggtaaccaaaaggtatgtattgctttttacagctttaaattgtatactcacggtataccacattaaacaaaaggagattatgttatgaaacagacacagccaaatacaactgcaaacaaacatggcatgctctatgatctggaagataaagttcctgccgtacaatctgtcatctatggtatacagtatctggtttactttcttgccggaagtgccattatgccagttatcataggcgcataccttggtcttgatcaggctgagatcgcccaaatgcttcagcgaactttcttgctcagcggtggcgtttccattttgcaggcaatcctcggacaccgttatcctattattgatggaccagccggtctctggatgggacttctgatcattcttgcagagacctgtacctctttcggtcaggatcttgccgttttacgaaccaatatggaagtgggtatgatcattgccggtattatggttattattgttgccctgaccggactggtagataagattcttaaagtatttacccctattgtaaacggaacatttcttatcctcatggttatgcagatgagtgccaccgtcattaaaggcgcaaccggtatttcttctggatacaaaacaatccagccaaaattccttgcggtctttctgatcacaaccgcagtaatcttagtaatcaacctgaaagccaaaggatttttgcagtccatcgcaaccctgatcggtgttgtgtgcggctggattctggcatacgcgcttggcatttcaccggatttcatttcatccggtaatggtttcctggccatccctcaaccctttgcctggggaacaccaaccatttacccaagtgttatcattacctgtctgattggtgaatttatgcttttttcaaactttgcaaccagtctgaatggtatgtcagaattgctggaagtagaaaatactccaaaacaggtgaaaagaagtacggttctctttggctgtaccgctatactttgtggtgtatttccggttaccggattcgtaccatttgcttccgcaccaagtactaccaaactgacacgcgttgctgcaagaggacctttcatcatcggtggactctttatgatgcttcttggtgtgattgctccaatctgtaccttctttgcggcgattcctccggcagttggatattctgccatgatgatcgtatttgccatgatgttgcaacaggggattcaggaatttaagaaagtagaactgaccaatcgtgaaggcttcattatcggaatttcctttatgattggtgcaggtattatgttcctgaatgcggatgcatttatgacattacctcagatgctgcgttatatcgtctccaacggactgatcataggattgattgtagcgcttttgatggaacacatactgctgcgaaaaaaagttaaataatagtgaggcggcaacaatttacatattaaattaaaatattttttctctgatatttcaaagtatgtcatagtattaatttgtaatctcgctcatgttttctcaccaagaccaatttgtataaaaaaataggtatccaactggatacctatttttcagagcgcgagacgggactcgaacccgcggcctcgaccttggcaaggtcgcgctccaccaactgagccactcgcgcatttcttatttttttgtgctcttgctgaacacaagacataatatacaggataatcccctttctgtcaacgctttttccacgaaaaattaaagttcgaaattatatacttttttctgaaaattcgcacatttcgataatcctacagaaagccattacctaccaaatactttacggagcatttatctcagtcggagattgaactcccactgagaaatacttgttactactcaccacttgcagaagtgggagtctcaactcagactgagataaaacaaacccggatacgaaatcttccgcatccgggcttgctgaaatctttctggtcttttgaatctgtttactctactgttacagattttgcaaggtttctcggtttatctacatccagaccttttgctacgctgacataatatcccagtaactgtaacggaatgattgccagactggttgcaaaatgcggatctgtcttcggtacataaacagagaaatctgcggtatcttcgataccatagttgccatatgtggtcagtcccatcagatatgcgccacggctttttacctctaccatattgctgatggttttctcatataggttgctctgggtcaatacaccaacaaccagtgtgttgtcctcgatcagactgatggttccatgttttaactcacctgctgcatatgcctcagagtgaatgtagctgatctctttcatcttcaggctgccttccagactgatggcataatccagaccacgtcccaggaagaacatatcttttgcgtttgcatatttgcttgcaaaccactgaatacgctctttgtcatccagaatcttctgaattttggcaggaagctcatttaactctgcgatcatctttgcacaatcttcttcactgagcagaccttttacctgcgccagacgcattgcaaacaaatacatcgcgatcagctgtgtgctgtaagcttttgttgttgctacagagatctccggtcctgcgtaagtgtacagagtatgatcactctcacgggcaatgctggagcctactacgtttacaacgccaagaacagctacgcctttctcttttgccagacgaagagctgccagactatctgcggtctctccggactgtgaaatgatgacaaccagtgaatttttcaccagaatcggattacgataacggaactcggacgcgatgtcaatctcaaccggaacctgtgtcatatcttccagtacatattttgctgccatagctacatgataagcagaaccgcagcctacgatataaacacgctcaatatttgccagctcttcatccttcagaccaatctcagagaaatcaacagcattgtcttttacatatgcgccaatcgtatcctgaacggctctcggctgctcatggatctcttttaacataaaatgctcataaccgcctttttctgctgcctcagcatcccatttgatctgaaccatttctttttcgatttcttcttcatccatgttgaagaaatgaatctcgtcttttgtcagctctgcgatctccagattgtcgatgtaatatacattacgtgtctgatctaagatcgccggtacatcagaaccgatcagtgtaccatgctcgctctttccaatgatcaacgggctgtcttttcttgctgcaaaaatcttgttcgggcagtctttgaacataacaccgaatgcataagaacctctgatgtgaagcattgctgtcgcaattgcagtcaacggtgactctgtctttttgtaataataatcaatcaattttacagctacttctgtatctgtctcagaatagaatgtatagccacgttttactaatttctctttcagttcctgaaagttttcaataattccattatgaaccagaacaacgtttttatcatcagagcaatgcggatgtgcattgttctcagacggctcaccgtgtgttgcccaacgtgtatgtccgataccgctggtaccgattacagaatgtccgtcatctgttttctcgatcagggtacgtaaacgacctttggcttttactacttcaacatttccgttggactcatcacgaacacagataccggctgaatcataaccacggtattccagttttgaaagtcctgcaagtaagatcggtgctgcctgctgctcaccgatatatcctacgattccacacatatgactgtttctccttatctttccatttttcttctatgcaaactgcacatttcattttatagttgttgtttcaacattttaagttgttttttcaataatagttaccgtcttgtatcataccatactatacttattgttgcaatacatccagtgctttttgaatctgattatcgtattcttcgctatattttgcatcctccggaccggtaaattcgtattcaatctccacatccggctggataccaatgccctgtatgcaggttccgtttggtgtaaagtaacggctggttgtcagtttgaaagcacttccatctttcagagacagaatcgactgcacaacaccttttccataagttgtagttccgataatcgtgcccgcttttcgatcctggatcgcacctgcaaaaatctccgatgcactggcactatttccatttacaagaaccgccaacggcagatccaatgatttatcatctgtagaattataatcctgacggtttccatctttatcttcggtatagactaacaggccttccggcaaaatatcatccagcatactgcatacggaagtgagcataccgcccggattggaacgcagatcgacgatcagcgcggtcataccttcctgctgtaattcagacagtgcatcctcaaactgctctaccgtatgttcggtaaactctgttacctgtatgtatccggtctggttttccaacatcttctgggtaaccgtgggaagcaccagattttttctggtaatgtcaaattccagataatctgattctccggatcgtgcgatcaccagatgcacctgtgtaccttcttctccacggacgtgtgtgataaactcgctcagatctgtggacgctgcctcataagaatctgcggaaacgatcacatcgccttcctgtaatccactctcctgcgccggtgaaccatcatacacatgcatgaccgtaacaacctttgtgtctgcatcctgctgcagacttgctccgattccgcaataagtaccggatacattggtatcatacaactgttgtgcttcctctgccgtataatactgggaatagacatccagattgtcaaacaatcctgcatacagtccttcctgcagagtacccgtatctacatcctcataataattcgactgaatataagctgccagtgtctgaagtttttttgaagtcgtgcggtctaacagtccagttctgcttaccgaaacaccagaaacatactcatacacaccaaaaataacaacagagagaagtgccattacaatgaccccggcaaaaaatccctttccaaacccgttttgtttcttcttacgcttcttttttcctgattttgtttcgaaagattcctctggctcttccaccacaaaatctcgttcttcctgattcattgtcaaatctcctttatttttttctaaaatcagcagaagcgccggcactttcggttatcattccgaaacgtgccgccgccaatattaatcccaccatattagtgctgcgatttgtctggatgttttttcatcatcaaatctcctatttttctgctatattatatgatataaactgctatttatatcaattatttccatcttcagcactgattcaaaaattgctattttttgcatctcacatatcttatacattgatgtgctttcttacggttacacgactgccaatgtatccgattccaacgccaaggatcagaccaaccggtaataagatctggaatacagtatctaccggaaggaacgtcagcaggttgttcaggaatccaaaacgatttgcaacatattcaataattcttccatacatagcatgaagaatgatcagcggaatagctgctccgatcaggccgatcagaataccctccacgataaacggcgcccggacgaaataatccgtcgctccgatgaccttcataataccaatttcttcttttcgaacagcgataccggtacgaaccgtattactgatcaggaatacggcaacgcagatcagaatcaggataataaccgcagatacaatacttaccagtcggttaaaatcagtcaatgtatttgcaaccatctctgactgacggactctgctgacatgatctaagccttccagataagataccagactgctctgctgcgaaatgtcctccatatagatctcatagttggattctcctgccagcgggttatctgtaccaaaacttgctgccgctgcctcatcaccgtcaaaatactctaatttgtattcttcccatgcttcctcggcagaaacataattgaaactggatacttccggtctcattgcgatttcctgaccaatggcatcgatctgatcctgtgtcgtaccagcatcgaagaatacggtgattgctacgccggactccacatctttgactacatgctggaagttaattacgatagaataaaacataccaaacatgaaaatacatgccgccatcgttgcgatggacgcaatggaaaacattttatttgtccatatatttttgataccttgtttgatggtgtatccaaatgtactaattttcatcttcttcaccgcccatctgtacatcactgactacatgtccctgctgcagtgtgatgacacgtttcttcattgcctcaacgatctccatgttatggctgactaccagaacggttgtgccacgtttgttgatctcgtctaataatttcatgatctcccatgcattatttgcatccaggttaccggtcggctcatctgccagaagaatcttcggctcattgatcagcgctcttgcaattgccacacgctgctgctctccaccggataactggtttggtttggatttatattttgctgccagacctaccagagaaagcattttcggtactttttctttgatagaacgcgccggtgcagatatgatccgctgcgcaaatgccacattctcgtatacattacggtcttttaacagacggaaatcctgaaacacacatccgatatttctgcggaaacgcggaacctgccggcgcggaatctcagaaagaatcttgtcatttatgataatggatccggaagtaggctccagttcttttaacaacaatttgatcagtgttgattttcctgatccactgtcacctactacgaatacaaattcgccttcttcaatctgaatatttacatcagcaagtgccgggacgccttccacgtatgacttgcttacgtcttttaaagtaatcattttatcctccttcgaaatcacttcaaaccatacttcaacttatctgtttccaactctatttgacagaaaaacttcatttttcctgttaggcaaaaaaaggggcacgaacgctttcaccatctgtgcccccaaacacttagcaacttaataatctaatgtttccatatatttcatgtattttacaaccattaatgcaatcttgaatgtgatcgcatcctcgaacacacgaagatccagtcccgtgctcttctgtaacttatccagtctgtataccagtgtatttctgtgaatgtacaactgtcttgatgtctcagacacattcaggctgttctcaaagaatttattgatggttgtcaatgtctcctcgtcaaagtcatccggagatttgccaccgaagatttctttgataaacattttacaaagtggaataggaagctgatagatcagacgaccgattcccagtgcagagtacgcaataatgttgcgatcctcgaagaagatctttccaacatccagtgccatacgtgcttctttgtaagaacgggatacttctttgatctctcccaccacagtaccgtatgcgatatgcacctctgcatcacctttgaacagaccaagaattacttccgcggtcttatccagatcctgattgctgtccatctcgtctacttctttgacaacaatgatatttttctcatctactgccgtaacaaaatcccggttcttgccctcaaagatactgcgtaccttctcaagctcatttccctctttgtcacggttggtctctataatatataccactctgcgcacatcagtttcaatatgcagttttttggcacgattgtaaatatctaccagaagcaggttatccaacagcaggttcttgataaaattgtctttatcaaatcgttccttatatgcaaccagcagattctgaatctggaaacttgcgatctgtccaaccatgtaaacatcatcactgtcgccgtttgccagcaatacatactctaactggtgctcatcaaacaccttaaagaaatgacatcctgatactacctgactgtcggcaggcgaatctaccagtgccatcgccggactgacataccgatctgcctcggaaaatgtcgttgccaggatcttgccttccgtatcaatgatacacaaatctatccttgttatattttttaatccatcaattgtattctgcaatatctgatttgaaatcataatgaaaagcccccctgtacacttccttatacaacattcacaataactaattctctttttcgcgtatatttttactgtgcatccttattttaagacaaaacacccaaaaaagtaaagaggaaatgcaattttttttatgcatttccccatatttcacactttttttagattttctccgaatacgactggaatccttctccccatacctctcttgcatcgcatataatcagaaaagctttcggatcaatttccataacggtctccttcaaccagacgatctgcttgcgggataccacacacaatagcatacatttttcctgttttgtatacatgcccttcgcctgaataccagtcacaccacgatccatctccgacaggatcacatcagaaattttctgcgtctcgtcagacaggatataaaccgcacgtgacacgtccagaccttccagcgtgatatcggacacttttgtggcaacggcgatagaaaaaatcgcatacaatccacttttccatccaaacagatacaaaccactcaccacgatcagcgcatcaatgatctgaatcaggcgtaccacggaaaactgtttccatttgctgtggatcaatactgccagcatatccgttccaccggtggtgcagtttgcccggagcaccagaccgattccaagtcccatcaggcagcctccaaggatcgtgccaatgacgaaatcattttctgccatatcaattggcggaatgatcactaaccatacagacagcaacaccattgcaagaaaggattttccgacaaattcttttcctttcttgatatatgccgcaataaagatcggcacatttaatacaaaagaggttactcccagcgggattccccctgcaacgatccaggatgtcagcgccttgataatgattgacaaaccggaaaatcctccggtaaccatatccagcggatcataaatacatttgaccggcaaagccgtcagacctgatccgataatgatcagcagcagatcctgaactgtttttttaccagctaactgtttcataacacttcccccttatctgaattttaatgcccctgcagtctgtcaactgccaaaggaacaaaaatatctcagtgaaaaacatttctccactgagataaaaactacgcaaattttacgatcaatctgttttttcctctgattcataagactggatctgacgcttcatcttatggcgcgccagcagttttttacagattcccactgatttcttctttccattgacgaaggtattctcgcttcccacgccaaaccagagtcgcgcattcagcatctgtctgtgctctgccagaaatttttcctggcgtggagtggatagcatggaaaaaatcatatgtggcgataccgcattgatctcattgacgatctgttctgcatcctcacctgcttcttcccagactgcatcaccacagacatacggcgcatttccaaaggaattttccagaaattcacaaagggtatccatctgcgtccgtgtctcatacagcagatatacactgtgtttcgcccggatcacccctcgcagagtctcggagacaaaccggtgctcccgcgcctcatccagccactttctggatgtcaccccaagttccatcaggatttccttatccgaagggatcaccagatccatatcctccagacattgtctgacctgttcatcctctcctgccgtcaccaccgttttcatagaaacggtttccaccgcatgaagtccttctgatgcaagataatgttcgattttatgaagtgcttcccgcaggctgcagatatcgattcgcactcctgccagttcttttctactactcattttgtcccatttcttttatacttattcgcagtgatttcacacattttttctgtgtcaaatcatcctttttatttataattaccaatcagaaatcaaatctccattgaatctttatacaataattgttcccatccgtcaagtatattccctctgccaaacaaaatgaatgataaaaaaagtcaaactttcttaataaaataacaaaaagaggatctgttttccacgtaccttcagatcctctttctgaccgttataaacaaggttatgcacattatccacaaaatccgatcattctgtccaaattatgccaaacctctgtattttatccgaattatcctaacactctgcggactgcaagaatatttgtataagttgccggtgaaattttaattccatcacttggattgcttgcatggatgatctgaccgccgccaatatataatgcaacatgtccgctatagcagatgatatcgcccggctgtgcttcggaataacttacgccacgtcctacactgcgtaatgcagatgaagaatgcggaagggaaattccatagtgtgcatatacctgcattacaaatccggaacagtctacaccgtttgtcaggcttgtaccgccccatacatacggattaccaaggaactggctcgcatagctgatcacggagcttccggaactgctctgtgcactctctacttccggtctttctgcatactgataagtatctgctacctctgcatattctgtggaaatatatccctcaccgtcagaagtctcaacttttacccatcccggtgtctgctcatcagtaaccgtaagctgttcgtcctgtcctgctaaagttacgacggaagcatctgtgcttgcttcgcttcttacttttaaagtctctgtctccacggtagctgttcgtgttttaacagaatccagtaatgcctgatctccaacagttaaatattctgctttgatatatccgctgatagaaccggatgtgatctggtaccatccatcttctgtaccagtaacagttgctaccgcattgtttttcataataccaacgatctcactgtctgtggttgcttccttgcggatattgatataactgtctgtctgtgtcacaccaagatttgcagctgctgtctgctctgcggtatctgcctgtgcaacaagaagtgaaactcctgaagccggtgctgcagtggtactgattgctgctgtattatctgtctctgctgcctgtgcacttcctgctcccatggtcagtactaaggtgcttaataataaacaggctgcaaattttctatttctggttctcatattgtcctccgtatgttccatactattttttattgttactttttatctcaattattacaaaattgttacattcaacatgtccgattataacaaatcagtatcatagtgtcaatataagtttccgttctcaacgttcatttcactgttttttcaccttatttttacaaattcagaacttattcgcaggcaaaaaaaagaacacagaattgtaacattttctgtgttctttcttaatttgttttaatgtgatgcattttgcgtattctgcgtaccggacgtgttagaatatgtttgggcatcctgtccactgtgattcggtgtcaacgcatcgatcaacggctgtaacagtccatggcttgtatgaacatcacataccttcgtcggcattgcatcttccccggacgcatcttttacataagtttttttcaccttgctgctttccgggcaatattctcctgcaagcaatccggaatccttacagatcaccgcagtctcatgcagatcacatttttcctccggttcggttccatccgcaaaatattccgtcacggtcttggagcagacacccgggattgcaatcttgccagaggttgcacacacggtatattcctgcacatcatccggcatctcaaaatctttgtattccagtccttcgtgaagttgtcccataatacggttccacaggatcttcggatatttggtagattccagttctgagtaatcgtcataaccgccccataccacacaggtgtaatatggcgtaaaacctgcaaaccaggcgtcacgggctgcttccgtcgttcctgctgtaccggtttttccggcaatcggcatggtaccaaaatctgccagttttccggttccgtattttacaacatcttccatggctgaggtcagcagatatgcggtactgtccttgatcacagtgtgtgtcttcggagtcttgtccagaagaacatttccatcctgatccaatatcttcgtatacaataccggttccttatattttccgccattcggaataacttcaaaagctgctgccagctccagattgctgactgcaccgacaccaagtggcaatgattccacaatatcgtcctttgtcagcgtagatataccaaatttctttaccatctcatagccggtctttggtgtgatatcttccaccgtcttgatcgccactacgttgacggaatcctgaatcgcctcccggatgctcgtatagccacgatacttgccatctgcattgtgtacggtctgaccggatgaatatgtgatcggttcatccagtaccgctgttgccagcgtgtattttccactgtccaatgccggagcgtaagcactcaggatcttaaaggtagaaccaggctgtctcgtcaccccggaagctctgtttaacgtcttacttgccgtcttttcacctctgccgccaaccagggccttcacctgaccggtgctctgatcgatgatcgttaccgatgtctgcggctgcacggtaaatgtcacattttccccaagcacggttcccccagcactgatcatggcttcccggtactcatcaatcgcatcctgtgcagatgattcactcttataattcagatcataggtttcgtacttcttcttataataagaaagcagattctgctcactgtaatgttccacagaaccatccgtcttttgaacggataatgcataggaaaaagaaacttttttggcaatatcagaataattactgtcatcatttacctgatcatcacaaatcttctggattttcggatcctgtgtcgaataaatggtcagaccaccgctgtacagtgctttatatgcctgcgcttccgaataatctaattcatcctgcagatcctgtaccacttcttctgtcagggaatctacaaaataagatgtgatattggtatcactgctctgccacttggtattgttatcctgaatccggtcgtataccggatcttccagtgcctcctgatactcattctcatcaatatacccctgctctttcatatttaaaagaactttctcacgccgggctgcattgtcctccggatgagaaatcgggttgtatttggacggattttgggtaattcctgcaattactgcgcactctgacaacgtcagctctgagacatcttttccaaaataacgtctggatgctgcctgcacgcctaacgtattctgtcccagattgatggtattcagataattttccatgatccagtctttggaaactttcttttccagctgtactgccagatattgttcctgcagttttcgctcaatacgctgtgaggagtcctctgtcgtccatccctcaaacacattatttttcaacagctgctgtgtgatcgtgctggctccttctgtgagatgtccggtggtcagtccctttgcaactgcccgggctattcccctcaggtcaatgccgttgtgatcataaaaacgctcatcttcgattgccacaaatgcatgctgcagatccaccggaatctcatccaatgtcacatagactcgattggaaccggttccaacaagctgcgcggtcacatttccgtctgcatccagaactgtggacatatatccggaaggtgtcgcatcaatctcattaatatccggtgcttctgcaattattttttccacaaaacgatagccctgataaccgacatatccaagtccggaaacaaacaacagcagcacaatcagtaacgtcagcgaagaaagcttcctgcgcatgaccgttccacgggaggtcagctcccatttcctgcgcgcagcattttttctgccataattcatagattccctccattcaagaatgccctcatcattcttgctgctcaccgccgctaaagacaggagccttttcttatctaatacaattcttctctgttaaacgaaaagtcaaacaactatattgcttatattaccattaatgcgatatactgtctacattagatgtggatacctcgcatctggcaaaaatataaaaacaatataattgtaaaaacaacgatctttaaaaatcaatttttcaaaaaataaaaatcctattgatttgtagattcatatatagaaaggaacatcatgagttataaagtattatatcaggccggtcaggatgaaatcgaagaaaaaaaatcccgtttcatcgcacacacgctcccggtcacctcggaagaagaagcagttgccttcttaaataagataaaaaaggaatattgggatgcacgtcacaactgtcatgcctataccatcgggaaaaacaatgaatgtacccgctgcagtgatgacggagaaccttccggtactgccggtcgtccgattctggatgtactgctccgggaagggattcacaactgcatcgttgttgtcacccgatattttggcggcactctgcttggcaccggtggactggtgcgggcgtatcaggcagctactcaggcaggacttgctgcaagtaccatcattgaaaagcagttcgggcacaaattacatgtcactacagattataatggcattggaaaactgcaatatctggtagcacagaaccagatttttacactggatacccaatatgccgataatgttacccttgatctgatggttcccgaggaaaaattcaaggatttttgtgttcagatcacggaagcaaccagtggacgcgctatcatggattccgaagatttagaggaattcggtattgttgacggtgaaatcattttttaattgatatttttctttcattttacatttatttttaaaatgtcagattattatcaaaaataagttaaaaattcaaacgtagttttttcaaaaaaggggttgcaatccttggaaacttgccctataataacacttgtcgacaggacatgaggcaaacacctcaaagcaaagccttcggcaacaagtaatggcccatcgccaaatggtaaggcaacggactctgactccgtcatttcaaggttcgaatccttgtgggccagtcatcaaaaagcaccatgtaaatggtgcttttttgtttagcaggaaatttcatataatttcctggcatttctttttttaacaaaactgcggacgatccgctatcctgtatttttaaggaggacgattttcatgtatcagtttaaaagccgcgtcagattcagtgaggtagacagtcacctcaatatgacaccgccatccattatcaactattttcaggattgcagtactttccactccgattctatcggacagggtatcgaagtcatgatggaacagggatatgcctggattctttcttcctggcagatcatcatcaaccgttatccaagatttggtgaagaaatcacgatcagtacctgggcacacggctggaaagcttttttcggataccgtaatttcaaaatggaggatgcagagggcaatattctggcttattccaacacaaactggatctacatgaatatcaaaaccggtcgcccggaacggattccaaaggaagtcagcgacctttatgcctgcgaaccggcaattcctatggaagaagcatcccgcaaaattgcccctgtcacagagggcattagccttagcccgattcaggtgcacaaatacgacattgattccaacaatcatgtcaacaatgagcgctatgtgccaatggctatggaatgtctgccggatggctttatcatccgtcagcttcgggtagaatatcgtaattccgccgtatacggcgatacgatttatccattctatcatcaggaaggtgataccctgaaagtgtccctgaatgatgcggatggcaaaccttatgccattgtagaatttcaaagctgacatatatgcagaatataaatatgtcatatttaaaacatctttctatatgatataagtaatgcaacgtacgtatagaaataaaataagaaataacatataattatcaaaatattttacaccaccagaaaggacggatacacaacatgaaattaggagaaaaacagacacttaccgtagtaaaacaggtagatttcggcgtttaccttgcagagcagcaggatgacgaaacccgcgtactgctcccggcaaaacaggttccggaaggaacaaagctgcacgacaaactggaagtcttcttatataaagactccaaggatcgtctgattgccactacaaatgagccaaaactgacactgggcggttttgccgttctgaaagttgttcaggtaacacagatcggcgcattccttgactggggactggaaaaagatcttttgcttccttttaaagaacagcttcgtaaggtcagagaaggcgacgaagtacttgttactctttatatagataaaagtaatcgtctctgtgccaccatggaaggtatttaccatctgctctccactgattctccatacaaaaagggagacacggtaaccggtcgtgtatacgaattcagtgacaacttcggtaccttcgtcgcagtagatgacaaatattctgcccgcatcccgggatttgagaacactactgcattaaagatcggtgatatcatcgaagcaaacgtcacaaaccgcaaaccggatggaaaactggatctgaccattcgcgcaaaagcttatgttcagatgaacaaagatgctgaagatgtattaagaatcattgatgagtacggcggagtccttccatttaatgacaaagcttcaccggagattatcaaacgcgaagctcacatgagtaaaaacgcatttaagcgtgccgtaggacatctttacaaagaacgtctgattgaatttacagataaaggaatccgacgggtataatgaatccgacgggtataatgaatcaatcaaataacagacctgtagaaaaatacagtctggatctgtgtaaatttatcatggcattcgcagtcattgcaattcacacggatccactggttgactgcagcaatactgccatgtccagaatcggatacctgtttctgtccatggcagttccatttttcttccttacctccggatatttgctggcagccaaattgctgttcccattttccagacaggaagacctttcaaaaatcagacgttatatgacaaagatcttaaaaatgtacctgctttggacacttttatatctcccaatggcactctggcattttgttgccaccggaaaaacattgcatcgtgcgattcagctctacattcagggattcttctttgtcggtcaacagtataattcctggccgttatggtatcttctgtcgactttttatacacttggagttttgtatctgctgttaaaatgcaaagctccacctgtaacatttttgctggtaagtggaatttccgcggtcatcagttttaccattgacgcactgattgcttctccggaccactttccgacaactatacaggcacttttaccgattatacacaatacggtacagcacggacgtatttttaccggtggaatttatcttcctctgggaatgttgcttgcctaccgaaaacttccagctctgctgaacagaatcctgcttcccgccggatgcattgccagctttctgatccatgtatctgttgtcgatgcctgtcttctggttattatttccgtcagcttttttggtattgtagaaaatctttccctaaaaaagcaccgtatttatcattttatgcggcattccagtatgatcctgtatctgatccacatgtatgtctggagcatttactataagctgctgtataaacataaggatcatggcattgacgattttctgatcacctctgcgctcagcttcgcactggctgcactttatatcttattaaaaaacagacgtttaaagttaaaatcagaacctttcacaaaagtttctgccaaatgaaaaagaaccggaatttgacttccggttctttttcgattgatgtatatactaactaaggggattagataataccgtttcttaaacctcaaagatgagatcgccgtaagatggcattggccatactttcttgtccacaataatctccagtttatcaatcggcgcacgaagttctgccattgcagttgtaacttcatcccgataataagctgcacgctcagcaccatcttccatggtcagacctttgtctgtcacttcttccagttttgccagcgccacttttgcatcagataataatccggatgcttcctgaagcagttctgtctgtacactgatatcgcaatcgcaggctgcttttaccgcattgatggattctgccagagatgtgatatatttgatcactgccggaatcaatgtcttgtttgtgatattgatcatcgctcttgcttcaatattgatctcttttgcatagatttcatactgaatctcttcacgggactctaactcagcttttgtaaatacgccgaatttttcaaacatattgattgctttatctgtggtcagtgcaggaattgcatcaaccatagatctgatatttggtaagcctctgcgctctgcctcagctacccatgcatcagaatatccgtcaccattgaagataattctctggtgctctgtcagatattttttaatcagatcatgtgctttttcgttgacatcttctgctgtttccagttcatcacaaacttcctcaaatgcctctgccacgatggtatttaatacaacattcggtgcagagatagaatcctgggaaccaaccatacggaactcgaatttgtttcctgtaaatgcaaacggtgatgttctgtttcggtctgttgcatcttttgcaagatccggcagagaagctacacctgtctgtaatacaccaccttttaaggagtgtgtagcagaaccggtactgatcagctgagaaatcacatcgtcaagctgctcgccaaggaatacggaaacaatggcaggcggtgcctcattcgcgccaagtctgtgatcatttccaacatctgctgcagaccagcgaagaagatcagcatgatcatcgactgcttttaagatgcaggcaagtaccagcagaaactgaatattctcatgcggcgttttaccaggctctaataagttgataccatcatctgttgtgatagaccagttatcatgtttaccggatccattgacaccgtcaaatggtttctcatgaagcaggcactgaagtccatgctcgtttgctttctttttcagtacttccataaccagatggttgtgatccagagccaggttacaggtctcatagatcggtgccagctcatgctgtgccggagcaacctcgttatgctgtgtttttgccggaacacccagtttccacagttcttcattaacatctttcataaatgcagcgatacgtggacggatgcttccaaaataatggtcatccatttcctgtccttttgccggcatggaaccaaataaggtacgaccggtgtagatcaggtcttttcttcttaaatatttttctttatctaccaggaaatactcctgctcggaaccaacagatggagtaacttttttagaagttgtatttccgaataatttcagtaaacgtaatgcctgtgtgttgattgcctgcatggaacgaagcagtggtgtcttctgatccaatgcctcacctgtataggagcagaaagctgtcggaatacaaagtgttgcacctgctgcatcatgtcttacaaatgcataggatgtacaatcccaggctgtatatcctcttgcctcgcatgtcgcacgaagtcctccggacgggaaagaagatgcatccggctcacctttgatcagctctttaccggaaaagctcatcagtactttaccctgctcattcggagcagtgataaatgaatcatgtttctctgctgtcacaccggtcagcggctggaaccaatgggtataatgtgttgcgccctgctcgattgcccattccttcatttcatgtgcaataatatctgcagttgcaagatccagatctgttccctctttgatggtctcctgcaatttctgatacactttcttcggaagtctttccttcatcacagtatcattgaatacattttcaccgaaaatatcagtgactttgaaatattcactcatcttcttgattcctctcttttctcatatttttacagtcccctgagtatatactgatctgcccgttctcatctttttatgtatccgggacaattctgctataagtaagcatttttccatccgcttatgctgcctgttcatatccgaaataactattcatcagattatttggctaaatgatcaattttatctttttatagcagaaaagggtattccaccatttgttggaacacccttgttcagcacgtattcatgtcttgcaattaacatagtacaaaattctaaaaattgcaagaggccaaaaacatttttgtccatttcaacaattatgagttgtaaaatgctaatttttcgtaactttttacaaattctcaggctttgtcgatagaaccaaaaatctccattttctcttttactttagctttgatagcatcgaatccaggagcaagtaattttctaggatcgaatcctttacctaccaggtctttgccttcttcgatatattttcttgtagcttcagcgaatacaagctggcactctgtatttacgttgatttttgcaacaccaagagagattgctttcttgatcatgtcatccggaatacctgtaccaccatgaagtactaacggcatatcgcctgtcttctgctggattgcatccagagtctcaaagcttaagccagcccagttttccggatatttaccgtgaatgtttccgatacctgctgcaagcattgttacaccaagatcagcgattgctttacactcatccggatcagcacactcgcccattccgattacgccgtcttcttcgccaccgatggaaccgacttctgcctcaagagataatcctttctctctacaaacagcaacaagctcttttgtcttggcaacgttctcctcgatcggataatgagaaccgtcaaacattacagatgagaaaccagcgtcgatacatttgtagcaagcttcatagctgccgtgatccagatgtaatgcaactggaactgtgatatttaactcttccagcattccgtttaccataccaacaatcgtcttgtagcctgccatgtatttgccggcaccttcagatacaccaagaataaccggagagttattctcctgagcggttaacagaattgcttttgtccactcaaggttgttgatattgaactgaccaactgcatagtgacctgcttttgctttttcaagcatttcttttgctgaaactaacataatgagatcctccatttgtttaaaaaaatattgttaatataataacattataaccttatcagataaaaaatggaagtcctattttttacctgacatataaaaatctatcaaaatgctgccgttcacacgcgccatttgcaaaacgtcctttcaagattactctaccataaaggtaattctgcgacagtggttataaatttctacctctttatgatctccgccaaactctccatccagcgtccacggtacatagtcttcgcattttaatcgaatatgatccgtcttgtaagtataaatataaggtgtctctatatccttcggcatcaccagattagacaagatctcatttaactggatcggattctgaggcatcctgatcaatgtcacctcgaattcaccgtcatccagttttacgttatttcctgtcatgtttttcatgccgcctacagaaacagaatttgtgatcataccatagataaactcgtcccggatcgtctcaccatttacttccacttccagatagtaggatggaatatcgtacaatcgttttgcgctctccagaatataagccacatgcccaaaaatatttttcagcttctggtttgtcatataagacacatctgtaaataagccgaaagctgcaatatatacaaaattatcctcattgaaaacacctacatcacagggaaactgccggccactgacggcaatctcagctgcacgcagcatatttttgggaatttttaaagactgggcaaaatcattggtacttcccgccggaatataaccgatgggaacgatgccatcacatcgcatcatgccggtaacaacctcatccaaagttccatcaccgccactgcacacaaccagatcatattcttctgcctgttcttccactttatggactgcatcttccttttcctgtgtcggatagatggtaacctcatatccatttttgacaaaagtatcaacgatggacaccaactgcattcgaatctgtccttttccggaatgcggattaaatataaataataattttttcttatccatttctattcaccttcctcagtccttaagccttctgcaatctctttcagttttctcagccggtggttcacgcctgattttccaactggcggatccagataggttccaagttcctgtaaagatacatccggattatccagacgtacctgcgccatttcccgtaatgccggggcaagctgctctaatccgatagttttctcaatataccgaatgtcttccacctgccgcgctgccgtacgcaccattttattaatattggcagagtcacagttggactgcctgtttgcactgtttcgcatttccttgataatacgaatattttccagttccatcagggacttgtgtgcttccatcacattcaggatctgaatgatctcctcactgtctttcagatacaaaatgtatttctgctttcgcagaataatctttgcatgtacaaaaaatgctgccatctgttcttttaaaaatgctgctgtctgttcatcctcgcaaacaatctcaaagtgataggatttgcccggatcactcatagaaccggcacaaagaaatgcccctctgatataagcacgcttgcttcctaacgtctgcagcaagtcccgtggttctgcctgtgcactccagatacaaatatcccgcagcgcctgctggagtttctgccgctccggaagttcctccgaataaagcatatcctccggtcgctccgacaacaatataaaatactgattattttttccggctccgtgtctgcgtatctccagctgcacctgaatgtcaaatgctttcttgatcagttttacaaacgtctttgccagtgccacattttccgtttccaccagaaccgccacactgtcctccaaccgtataattcttccacagaaacgaataatggcggaaagttctgcccgtacatccgcttcctgcatcggaatcagacgggcaatctcctccttcatctctccagaaaaagacatattacttcctcaactactttccacgctttgcgtctttatcaatatcgcggtgttctacccgcaaaccatatttctgatttttctttaatctctcgtaaagtgcattcgtcaatgtaaccgaacggtgctttccaccggtgcacccaatcgcaatcaccaggcgatttttcccttctttgatataattagggatcaggaaacgcaccatatcttccaatttgtccaaaaattctcccgcctccgggctattcataacaaactgctgaatctccggatcatttccggtttttggacgcagttcttccagataatagggattcggcaaaaaacgcacatcaaataccagatctgcatctgccggaatcccatacttgaatccaaaagacaggattgtcagatagatattgtcatattcctgatgtccaaggaaaatatcaccgatggcagcatttaattctctggtcaggagctgactggtatcaatgatataatctgccatctccttcaggaattttacctgcttacgttccaactcgattcctttttccacccggtcagttcctgccagcggatgtgcccgacgggtttccttgtatcgtttgaccagcacttcatccgatgcatccataaataaaatctgcacacaatttccccgtgcacgcagattctgaatgattccggataactgctgtaatgcctctccatttcggatgtccataccaaaagcgatccgctgaaactgtgtttccccggaatcagcaaattccgcaaacttttccagcagtgggataggaaaattatccacgcaaaaatatccgatatcctccataatttttaacgcagttgattttcctgcccccgacattcctgtcacgattacatattccatactgttcaccttactcctgatgtcctattttccagtcgtcctgactttcacgaatcttgttcgtcaaaaacttctttccgacttttctaacgtgctaaaactccccgattttcttcacttctgcttccagacgcacaccgaatttttcaaaaacaatttcagaaacctgattcatcaaattacagatatctgccgatgtggcatgatcccggttgatcacgaatccacagtgtttttcggatacctgggcgccgcctacctgaaagccgcgaagtcccgcatcctgaatcagttttcctgcaaaatatccttccggacgtttaaacgtactgcctgcactcggatactccaacggttgtttgctcacacgtttttctttcagatcttccatgaccgcacgaatttcttctgctttgcccggatgcagctccagaacagcagataccaccagatatccacgttccggaatgatgctgtgccggtaagacagatccagttctgccaccggaagcgtcagaaacgttccctccggtgtcagcaccgttacttctgtcagaacgtccttcatctctccgccgtaagcgcctgcattcatcacaactgctccgccaaggcttcccggaattccggatgcaaattccagaccggtcagttcctgcgcggcagcttttgatgcgatggcagaaagcatcgcacctgctcctgctgtgatttttgttccctcaatggaaatctctgacatctgtttaccgatttccagaacaacgccgcggataccgccatcgcccaccagcagattacttccgtttccgatcaccgtccacggaatctgtttctctttgcacagggcaagaatctcactgatctgttctgccttcggtgtcaccagaatatctgccggtccaccggttcgaaatgtcgtatgccggctcatggattcctcacaaaatacctgttcggaaccacagatctgacataacgtttcatatatttcttttttcatactctgctccaatttatgcatctttcaggaatgctttatatccgcattttgcttcatacagatctgctttgctgatgatctcccaaggtgcatgcatgttcagtactgccacaccactgtcgataacctgcatattataatttccaaggatataagcgatggttccgccgccgccctgatctactttaccaagttctgcggtctggaagtatacctgattgtcatccatgatcttgcggatctcagctacatactcagcaccggcatcgttggaaccggattttcctctggaacctgtatatttgttgaataccagacctcttccaaagtatgcagcatttttcttctccatgacacttggatagttcggatcaaatgcagcacttacatcagaagaaagtactttggaattctgtaatgcacggcgcagttttaattcacagtaatcgccgcaggcattcattacttctgcagtcatattttcgaagaaacgggactgcattccggttgcaccaacgcttccgatctcctctttatctaccagcaggcatacgcttgtgcgctccggtgcttccatctccataatagcagagaaggacggatatgcacacacgcgatcgtcatgaccatagcccatgatcatactgcggtcaaaaccataatctcttgcctgacctgccggaacgatctcgatttcagcagaaaggaaatcttcttcctccacaccgtaagtctcttttaaaattttcagcacgtttgcctgtaccagagtttttactttcttctcttcctctgtctttgcttccagcggcatgcttccaactaaaatatcaagtgcctcaccttcgatgacttttgcaccttttttctccatctggtctccggaaaggtggatcagcagatcgctgacaccaaatactggatcttccggtttctcaccgatgttgatcgctacgacagaaccgtctttttttgcgatcacaccgtgcattgccagtggcagtgttacccactgatatttttttacaccgccatagtaatgagtatccagcaatgccatatcagtatcttcgtacaacggattctgtttcagatccagacgcggggaatcgatatgtgcgccaaggatgttcataccttcctgcattggtttcttaccgatgatatacatagcaaaacttttacctttgttatctgcaaatacacggtctccggctttcagagtgatgccatttgcaatgacatcttccatatcctgaaatcctgctgcttttgcacgtttctttaattctgtgacacactcgcgctctgttttgcagtcagagataaactgacggtactcttcaccgtaagcaaatactgctgctttttcttcctctgtatattttttccatgcgttttttcgttccatattgttacactccttttgaatgtgctccgtaaagggaagcagacattctaattttgttttattaaaaaatatcattcaaaatcccttatcctcgtaaaagcaggggacttctttacattgggtcaagcggatatttgcaatccgcttcgctacttgctcataaccgaataactgctccgcagtttatcagaaagagcttgcactcctcctgatacaagcaagtccccacccactgcttattgcttttcgcaattgaagcaggggacttacttgattcggttaaatttccgtagaatttccgtttttcaggttattttctactcttcgatacaattcttttgccgcattatagcccatctttttctgtctgtggtttgcagctgctgcctcacagatgactgccagatttcgtcccggacgaatcggaatggaatgacacacgatgttgttgcccaaaatctcggtatattcttcttccagtcccagacgatcgtactctttgtctttcttccagtcttccagtttgatgaccagatcaatagtctgctgttccttgacacattctacaccaaacaatgtctttacatcaataattccgatgccgcgcagttcgataaaataacgggtaatatccggcgatgttccgatcagtgtattattattgatcttgcggatttctaccacatcatcggtaaccagacgatgtccacgacggatcagctccagagcagcttcactttttccaataccactctcgcccatgatcagcacaccttcgccataaatatcaaccagtacaccatgaatggaaatgcacggtgccagcttactggtcagaaaataaattgcttccgcagccacattggacgttgcatccggtgaactaagaattggaaccccacgctcccctgcaatccgcaatacaacttcatccggctcatattcacggcacataatgacacatggcacattaaatcccaaaagttttcgataacgatcctcacgatcttcctctgataaagtctccagataagaatactctaccattccaatgatctggattcgttcttctgcaaaatgttcaaaatatcctgccagctccaatgccggtcggttaatctccggtgtggtgatcattcgttttgacatatccacacacggggtaaaacatttgaatttcattttttccgctaactgttgtacactgactccctgcattatattttctccatttctgtattatttggcaacgattcaaagtgaaattatctaccctgaataatcgcataacctctagtagctgttacatattttttacagttcctaccaataagtacagtaagtataccacttttttactccttatggaagaattggtataccgactgcgccgctttttcattcatgccatccacttcccgcagctgttctaccgatgcttcccgaattttctccagcgactggaactgccgcatcagcgcctttcttcgtgtctcaccgatattcggaatatcatccagaatcgaacgcacctgctgcttgcttcgcagggaacgatgatattcaatggcaaaacggtgtgcctcatcctgaatccgggtgagcaggcgaaatccttccgaatgccggtcgatagggatttcctcattgttaaaatacagaccacgggttctgtgatggtcgtcttttaccataccacaaaccggaatcgcaagttttaattcatccagcacttccaatgcaatattgacctgaccttttcctccatccatcagaatcagatccggaaattttgtaaaactgccatattcctgcgccagattcttttccttgttctgtgcccgttcttccattccatgagtaaaacgtcgtgtcagtacttcccgcatggatgcataatcgtccggaccggttacggtctttaacttaaatttacgataatcgcttcggcaaggttttccccgttcataaacgaccatcgaaccaaccgattcaaaaccgttcgtgttggaaatatcataggcttccattcgtttgacatagccaagatccagcagatctgcaatttccttgacagctccgatggtccttccttcttcccggcgaattttttctttgtcctgagtcaataccatcaccgcattttgttccgcaagttctaccagtttttcccgctgccctttcttcggcactcggatataaactttctgcccgcgctttgcagacaaccactctgctaccacatttgcatcatcaatttccatcggcagcatgatctccttaggaacaaaaggcgttcccgcatagtattgaccgataaaagtggaaagaacctcttttttcgtatcctccgccccaatggtcacatgaaaatgctctctgccgatcagcttgccttcccggacgaaaaacacctgcacaaccgcatcccggtcatccattgccagcgccagaatatcgcgatcctcgccgtcaaaactggtgattttctgcttctgcgccacctgacgcacactggtcagcagatcccggtattccatagctttttcaaattccaatgcctccgaagccgccttcatcttttcttccagatccttgatcaccggtgcaaaattgccattcagcagttccatagctccccggatctgtaaacggtaatcttcctttgagatatatccctggcagggtgcctggcactgatggatatgatagttcaggcagggacgctcttttccgatatcgcgtggaagcgtccggttacaggttcggatctgaaacagcttctgtaccagttcgatggtatccttcactgctccggcactggtgtagggaccataatattttgatttatcctttttcatcaaacgcgaaaacagcacacgcggataagcctcacctaacgtcactttgatatatggataggtcttatcatctttcaacatcgtattatatttcgggcgatgctccttgatcagattgcattccagcaccagtgcttccagctcggagtccgtcagaatatattcaaaatgatcgatatgcgtgaccatcttctcaatctttggtcccttattccgactcgtctgaaaatactgacgcacccggtttcgcagactgatggcttttccgatataaatgatcgcgtcccggtcatcatgcataagatacacgcccggatgatccggcagttttttcagttcttcctgaatatcaaatagtttctctgttcccataagttttttcaatcctcttgaaatccccaaacggtcagggcagaaaattgcttctctactctgaccgtttctgtcatattattacttttttatcccacaatcggatatccgaccgcttttgttttcttactcctcaaaagcctcatccggtgcaaccggctcatttccggaaaactctgtctcattttccttgatcggtgcagactgtgtatctgtctgtgcagttacttcttctgcctctacatcgattggctggttcccttctgtcatctctttgaagatatccatgaactcttttccagtgatggtctcatgtccatacagatatccagcaatccgctccagtacatcgcgatggcttaacagcatttcttttgctgtgtcgtaagccttctgaagcattacttttacaacttcatcgacttttgcaatggtctcatcaccgcagtttgttacggcacgaccatctaagtatctgttctctacagattctacacccatcagaccaaattcatcagacataccaaactgtgttaccattgcgcgggcaattcttgtagccatctcgatatcattggatgctcctgttgtcacagaatcacacatgatctcctctgcggcacgaccacccatgtaagtaaccagacgcgcctccagctcggctttggtttccagatatttctcttcctccggcatctgcagggtgtaacccagagatcccatcgtacgcggcacaattgtaatcttctgtaccggctctgcatctttctgtaatgcagtaactaatgcatgaccaacctcatggtatgccaccagacgtttttcttttggtcccatgatacggtcttttttctctttaccggcaatgacaacctctacagactcaaataaatctgcctgtgtcacatactgtctgccattcttaaccgcattgatagctgcctcattgatcatatttgcaagatcggaacctacacatccggcagttgccagtgcgattgcttccagatctacggaatcatccattttaacgtccttggaatgtacacgaagtgtctccacacgacctttcagatccggtttgtcaacgatgatacgacggtcaaaacgtcccggtctcaaaagtgccttatccagtacttccggacggttggtagctgccaggatcagcagacctttggaagtatcaaaaccatccatctctgccagtaactggttcaatgtctgctcacgctcatcgtttccgccgccgtaatggctgtcacggcttttaccgatagcatcaatctcatcgatgaaaataatacacggtgcctgtttctgtgcttctttgaacaggtcacgaacacgggatgcgccgacaccaacgaacatctctacaaaatcggaacctgccagtgagaagaacggtacgcccgcctcacctgcaactgcttttgccagtaatgtcttaccggtaccaggaggtcctactaataacgctcctttcggcagttttgcaccgatggctgtatatttctgtggattatgcaggaaatctactacctcctgcagagactcttttgcctcatcctgtcccgctacatcgcggaaggtaacaccggttgatttttccacatacattttggcattgctcttgccaacgcccatgacgccgcctccgccgcccattttccgcatggcaaatccaatcagaatccatactaaagcgaccggaattacaaaactcaggatctgatatacccaggcagatgttgtattattcttaccggtataatcaacgtcgtactcatccaataattcatacatacggtcatcctttaagtttaccgtataataagttacctgatacaggctcttcttgtcctctaccggttcaatatcgatctgactgttggtaatgacaacactttttaccttatgttcctttaccatggtctgaaattcagaatatgtgatctcctgattcgtcagacttccaattccatttgtaatcattgttacaaggagaagtaccacaacggtcgcaagaacaaaccaaagcatgttctgaccatttttgcgccctttgttatttcctccctggttgtttcctctgttctcgtccattcttattatctctctcattcctgtgtatatccggctctggtctgacaggtcatttatcgcttccgtcaaaccgggaaggaactgtatacacaatcctttctctggtttcccctatgcctgcctgcattccctattgcaaaaatgcccgacctgcattgttttattatatggttattctgtatagaaatcaataatataatcgtgaacttttcttgatttttataaaatatttataaaagaagccccagatgcagcttctcatccgggactccttggactgaataaaatcagtattatttatttttgtactcaatagcagcttccacaaaacctttgaataacggatgtggacggttcggtctggatttcagctccggatgtgcctgtgtagccacaaaccacggatgagacggaatctcgatcatctctatgattcttccatccggtgaaagaccgctgagtttcattccatgctcagtcagaattgcgcggtaatcattgttaacctcgtaacgatgacgatgacgctcatggatggtctctgtaccgtataactcatatgctttgctgtcttttgcaagaacacaaggataagaaccaagacgcagggtgccaccaatatcctctactccgttctgatccggcatcagtgcgatcaccggtgcgcttgtgttcggatcaagctcgatgctgtgtgcatcttccagtccgcagatatgacgcgcatactcaacgatggaaagctgcatgccaaggcaaagaccaaggaacggtacttcatgctctcttgcatatttgatagctgtgatcttgccgtcaattccacgatcaccaaatccacccggaacaaggattccctgtacaccgccaagaacttcgtctacgttctcttcgttgagttcctcagaatctacccatttgatatttacagtcgcatgctggaaaattccaccatgttttaatgcctctacaacagaaatatatgcatcatgtaactggatgtatttaccaaccagtgcaatttcaacttctttgttcggattgcgcagagcctgtaccatctcgatccagtctgtcagatccggttccggacaatccagtttcaggcattcacaggcaacctgagccagattttctttttccattgcaagcggagcttcatataaatattctacatccaggttctgcagtacgcattttttcggtacgttacagaataatgcgatcttgtcacgaatctgacgatccagctcatgctcagtacggcatacgatgatgtccggctgaattcccattccctgtaattcttttacgcttgcctgggtcggttttgtctttaactctccggaagcggacagatacgggatcagtgttacatggatcaggattgcattctcatgtccaacttcatgctggaactgacgaatggcctcaaggaacggctggctctcgatatcaccaacggttccaccaacctcgatgatggcaatctgtgtctcttctgttgtaaaatcacggaagaaacggctcttgatctcatttgtgatgtgcgggattacctgtacagttccaccgccatagtcaccacggcgctccttctgcaatacggaccagtatacctttccggttgtcacatttgagctcttgctcagattctcgtcgataaaacgctcgtaatgtcccagatccaggtctgtctcagcaccatcctcggtaacgaaaacctcaccgtgctgaatcgggttcatagttcccggatcaatgttgatatatgggtcaaatttctgcatggtcactttgtatccgcgtgcttttaacaaacgtccaagtgatgcggcagtgattccctttccaagtccggatactactccgccggtaacaaatacgtattttactgccattgtttcttcctcctgtgtttattttatctcccaaaatggggtttttattctgcttcattcactgtaattttgttcaaaatcactgtacgttcctgtaaagtgtctgatctctggctgcgtgtaaactcaatcagagatgaaattacatacagtttttattatacaacctctggcgacagaaatctacttttttttcattgatcaacgacttttttcaaaatctgtcattttttcaataaaacgatataaaattatggcttatcgcttatcaaaaagaagtgtttttcatccattcaagaatgctccggcattcttgttgcgaggtgcgcgtcatgcaattgcatgacatacttcaactgcgc

SEQ ID NO: 13367 - DNA, 51242 bp, Unknown
  gut microbiota DNA sequence
aacagatcatcgcttacagagaaaaacatggtgcctttgcttcgattgaaggaattatggaagtggatggcatcaaacagggaacatttgataagttaaaagataatattacagtgcaatgaggtgacaaaatggcaaggaaagtgctggttgtagatgatgaaaaattaatcgtgaaaggaatccggttcagtctggaacaggatggtatggaagtggattgtgcctatgatggcgaggaagcgttggaaatggcgcatgctaaccgttatgatatcattctattggatgttatgctgccgaagctggatggatttcaggtgtgccagcagattcgtgaattttcttccgttccgatcgtaatgctgaccgcaaaaggcgatgatatggacaaaattctgggactggaatacggtgcagacgattacataacgaaaccgtttaacattctggaagtaaaagcccgcttaaaagcgattatgcgtcgtaccgcgaagaaggaagtagatacgaatccgaatgtcattgtggacggagacgtcagactggattgcgagagcagacggttatttatcagcggacgtgagatcaagctgactgcaaaagagtttgatctgatggaactgatggtaaagacaccggagaaagtatacagcagagaaaaacttctgaaccttgtatggggatatcagaacccgaatcagggagattttcgtaccgtagacgtacatgtacgtcgtttgcgtgaaaaagtggagaccaatccaagtgagccgaaatacgttcacaccaaatggggcgtcggctattattatcattctgatcagcagaggtaatggcattgaaaacagtgatctcatattttaaaagtctgaaatttcgaatttttctattattgatcgtatttggcatcgcccccggcttttcgctgcgggcgggcattttatctgcctacgaatcccgggctgtggaaacccgcacggtagatattaccagtcaggcaaaactgctggcaacacagatcgtggcaaataattatctggaaaatacttcctcacagaatattacgacgcagttagaacagctttctaccatttatgatggaagggtgatgctgattgatcaggcgtttcacattgtaaaagatacatatgcgctggatgagcagaaaacgattctttccgaagaagtcatgcaggcatatcagggagaaaccgtccagaaatacgattctgacaaccgttatatcgaaatgacactgccgatcaacgatgaatccggcaaaaatgtcattggtgtgatgctggtcagcgtgtctaccgacagtattgttgcaacgctgcagattttaaaacagtacgcactgatgcttcaatttttggcaggcgtggcagtagtgatcgttgcctttgctgtatccggagtgttggtaaaaccgtttaagcgtttaacgaaatccattacagatgtccaggatggttatgaggcagactttatcagtgtccattcttattctgaaactgatacaatatcgaatgcctgtgatgaaatgctccgccgtcttcagacgctggatgaaagccgtcaggaatttgtatcaaatgtgtctcatgagttgaagacaccgctgacttccatgaaagtactggcagattccctgatcggtcaggaggatacgccggtggaactttaccgggagtttatgtccgatatcggtgcggaaattgaccgtgagaacaagatcatcaacgatctgctgtctctggtaaaaatggataaagcggcaggaaatatcaatatcgaaagtgtaaacatcaatgaacttctggaacgtattatgaagcggctgaaaccgatcgcacagcggcagaatgtagagctggtaatggaaagtttccgcccggttgtggcagaagtagatgaggtgaagctgacacttgcactgtcgaacctcattgaaaatggtatcaaatacaacaatgcagaaggatgggtacacgtgactttgaacgcagatcatcagaatttctttgtaacagtagaagataacggcattggtattccaaaagaggcacagacacgtatttttgagcgtttttaccgcgtggataaatcacattccagagaaatcggcggaaccggtctgggacttgccattgcacgaaatgcgattattatgcatcgtggcgccattaaggttcacagtctggagggcgaaggtacgacatttacggttcgtattccgctcacctatattgcagggtaaccggtaagggggattccatgagaaaattaatacgttttggtattttactgtttgttctgatctccatgagcagtatgctgaccgcctgtaaaaaagaaaaagcggaaagcagcggctattccatgtattatctgaacaaacagcgaacaaaaattgtaaacaaaccatatgatccttctgctacagatacggaaggactgattgaagaatttatcacacagatgtcggaaaagaccgacgatgtggattatcagcagattttatcggacaaagtggaaattgaacgttatgaatataccgatcatcagctttatctgtattttaacaaagaatatggcaagattgcgccgctggaggaggttttatgccggggtgcgattgtgcataatatgatgcagatcgaaggcgtcgaaggcgtttccatgtatgtggataacctgcctttgaaggatgcgaacggcgtagaggttggcattctgaccaatgattcctttgtggaaaatccgggagagaagatcaacaacattcaggaagcgaacctgaccttgtattttgcttcggagaatggtgacggacttgtacgtgagacgcagcatgtttattactccagcaatacttctattgaaaaactggtaatggagcagctgttagacggaccgcgttcttccaatgcgcaggcagcgattccgttcggaacaaatctggtcagcgtatccgttatggatggtgtgtgtctggtgaatctggatgaaggattcttagctcaaaattttgaaattcgggaagatgtaatcatttattcgatcgttgattcactgacggaactggatacggtaaagaccgtccagatcgcagtcaacggaaaaacaaacctgacttatcgggataagatgtccctgaaagaatattataaacgcaatctggatcttgtgacggaagaaggcgacgatgtggagatcgtacagaaacaggagaaggagggattgcttgattctggcgaataggcatcacatctggctgtttgcggcagcttatacggcgggaattttacttgccgggcaaatgccgcagcaccagatacttcctgccattttgattctggcaggcattggtgcagtgtgttatctgcacccggcaaaaaaagaatgcgtgatattagcattgcttctttcaggtgctgtgctatccgggtttggattgacacggcatcaggcaatgcagtacacaaaacgggtttcactggcagaacagcacatggaaacatcggttcgtatcagtggaatcctgacacaaaaagaacaaaaatctgacaaatatctatatcaaatcaaacaaacgtatctggagacagatcaaacgcccgtgtttctgggcaatattttattatatacaacaaaagacaactgttctatcggaacaatacttaccgctgaaggagaactggacgtttttttacctgcaaggaatgaaggcaattttgactttgctgcttattatcagcaaatgaatattacctgccgtttttacgcggatactgttaccgtacaaaagccttcgcgtttttcaatacgggaagttctgtatcagttacaacaaaaaattatgcaaacatatactacagagttaaatgagcgtgatgccggcattttatcgacgctggtagcgggaagtaatgcacagctggatgcgcagacaaaggaaagctatcgaaaagccgggatttcgcatattctggcagtttcaggattacatatatcggtatttggatttagtgtgtaccgttttctccgccgctgtcggcgttcttacccctgtgcagcgctgcttagcagtctctgtgtgattgactttgccatgatgagtggtttttgtgtgtccgcgcagcgggcagtcatcatgtatctatgtatcatgggcgcagaaatacttgggcgaaaatacgatgcttcccatggactggcgctggctgcttgtatcattttgcttcgcaatccctttgcaatttatcagagtggatttttattttcttttacagcattacttgcgattacggtatattccggtctgcaatcggagagagaaaaagcaatacaaactgcatcagagaagagaaaaaatcatataaaaggtcgtgttgggacatggtttcaggacttttggaaacgattgcgactgaatctgtttttgcaattatggctgatgccattgacggcatggttttattatgaaattccggtgtatgcactgtttttaaaccttctggtgatcccgttatgtggctggctgcttggctttggagtacttggcgcagttgtcggtatgaaattaccggtttgttccaagtggattctgattctctgccactggattttaaatatttacgaaaccgggattgatctgacggacaggctcccgggacatttgtggattacaggacaaccgtctatgaaattactgatcttatattatggaatctttggtggatatgtgatcgtatatcattttgggaaaaagtggaatctttattctaaaataagatctgtttttgccggaatatgtgttgcatgttttgccttgtgcctgttggtgccgcccaaagatctgtctggaatatattttctggatgtggggcagggcgacggcattatgatttctgatggaaagcagaaacatatttttattgatggtggaagcaccagtgaaagtgctgtgggaacgtatcgcgtcttgccatttctgaaatatcaccgtatccggcagatcgatgcatggatcgtgacacatacagatgctgatcacatttccggtttgacagaagcgttagaatccggctatccgattcgccgattattgctggcaaaagcagcaccggcggatgatgcactggaacatctggtaacgctggcaaaagaaaacggaacagaagttgtatttgttcaggcaaataccactttaacgatgcaggatgccacgatgacctgtctgtatccagaggcagaagaagcagaaatggagaaaaatgcgctgtcgcaggtgtggcgttatgaatccgatggtttttctgttctgttgacaggggatcttggcagtgaacaggaacagattttggtggaacgaaacttattgcaaccagtaactgttttaaaaacagcacatcatggttctgcttattccagcagcgaaacgtttctggaagctatacgaccagcggtagctgtgatttcctgtggagaaaagaaccgatatgggcatccggcatcggagacaatcgaacggttggaacaggcagacacatccattgcatatacaatgaaaagcggacagatttccgttgtaaaagagcatggcaaatggaaggaagtgtattttatcaaagataaaaggtaggtatttttgttatagtttacgcatcacatgtattcgggaaatgattatttttacaaatgtcgcgtgtaaactattatgtatttttacatatcctgacagatataataacaggtgtcttgacacctgtaaaccatgatagtataatggcaaaagcacaaaaagaatccgggcagtgtatattaggtcagtttaaacgctttttccctataagccaaatcgggaaatcgcatgctaatatatgctgcccggaaagaggataagagtatgaatatgaaagagtattatgatgtcattatagttggtacgggagctgctggtttgtactgtgcattgaatcttccggagcgaaaaaaagtattattactcacaaagcagaaagcggatcagtccgattcatttctggcgcagggtggtatctgcatgcttcgtggagaaggcgattacaacgattattttcaggataccatgcgtgcgggacattttgaaaacgatgaaaaagcagtggaactgatgatccgcagttcaaacagtattatccgggatctggtacgcagacacgttgattttgcaagggatgcacagggaaatctggcttttaccagagaaggtgcacattcccagccacgtatcctgtttcatgaagatgagactggaaaacagatcactcagactttgttagatgaggtaaatacgaaagataatatcgaaatctgtgaatatatgaccatggtagatctgatcgtcaaagataacgtgtgcggcggtattattatcatggatgaaaaaaatgaggtatacccggtacgtgccaaacatgtcgttttagcgtgtggtggtctgggtggattgtatcagaattccaccaattttccacatattaccggtgacgctcttggaatcgcaatgaagcaccagattgtattagagcatctggattacatacagattcatccaaccacgttgtattcaaaaaagccgggaagacgttttctggtatcagagtccgttcgtggtgagggtgctctgctgctggataaaaatggtcagcggtttacggacgaattgcaaccgcgtgacacagtaagtaaagcaatttttgcacagatggaaaaagagggcagtcattgtgtctgggaagatatgcgtcctctgggcaaggatacgattctgaagcatttcccgaatatttatcagcattgtctggatgagggatatgatccatgcaaagagccaatcccggttgttccggcacagcattattttatgggcggtatcaaagttgatctgggaagtcgtacttccatgaaaggattgtatgcctgtggagagacaagctgtaacggtgtacacggcaaaaaccgtctggcaagcaattctctgctggagtctctggtatttgcacggagagccgcagatgacattatgtttggggaagaaccggaatttgatgcatcgggcagactggattgcagcagatacgaagaccgggatgctattttgggtgaataccataaagcagtacgcagtgagatcgaaaggatgaaaaagagtcatgaatagtattacgatgaaattgcaggcagacgaactgatccgtctggcactgcaagaagatattacaagcgaagatgtgtctaccaatgcggtaatgccaacggcgcagcagggaatcgtagatctgattgcaaaagaagatggcattatggcaggtctggatgtctatgcccgcgtgtttacgttactggatccggcaacggttgtgacatttcaggtaaaagacggagaccgcgtaaaaccgggagatctgattggaacggttaccggtgatatccgcgtattactttccggagaacgtgtggcattgaactatctgcagcggatgagcggcattgcaacttatacccgtcaggtggcagaccttctggaaggcagtggagtaactttactggatacaagaaaaacaacgccgaactgtcgtatttttgaaaaatatgccgtacgggttggtggtggctgcaatcatcgttacaacctttcggacggtgttttgttaaaagataatcatatcggagctgccggaagcattaaaaatgctatccaaatggcaaaagcttatgcgccgtttgtccgtaaaatcgaaattgaagtagagactttagagcaggtaaaagaggcagttgatgccggtgcagacattattatgttggataatatgacaccggacactatgcgtcaggcagtagaactgatcgatggacgtgcacagacagagtgttccggaaatatcacaaaagaaaacattgcccgtatccgggagatcggtgttgattttgtttccagcggtgcattgacacattctgcaccgattctggatatttccatgaaacatttacatgcgatttaatatgggagattcgtgaacgattcttttcataacatacgtagagaaacaaatttttacaaatgagtcatgccatgaaaaaggagattgatttagaatttgtgtaagaaagtgagaaaataaaatgacaatagcagaaatacagcaggaaatcatgcgtatgaaaaaggagcaggatgtctgtatccttgcacatgcgtatcagggacaggaaattttggaagtagctgactatatgggtgattcttatggcttaagcgtacaggcatccaaaagtaactgcaaaggcgttattatgtgcggtgtccgttttatggcagagacctgtaaaattttaagtccggaaaaaacggtatggcttgccaatccggcagcgggatgtccgatggcagagcagttagaccttgattttttacgcgctttaaagcaaaaatatccggatcatgcagtggttgcctatatcaataccacttctgaactgaaaacagagtgtgacgtatgtgttacttcatcctctgctgttgaaatctgtaaaaaattagatgcagataagattttatttattccggacccgaaccttggtcgttatgtggcacagcagcttccggagaaagaatttgctttttacaccggtggatgtccgcgtcatatgatcgtaacgccggagcacgtcagaaaagcaaaagagctgcatccgaacgcgttgcttttggttcacccggaatgtcggcaggaagtcgttgcacaggcagactatgtcggttcgactaccggaatcatgaattttgcaaaaaaatccgatcataaagagtttattatcggtactgaaaacagcatcgtacagcatttacagtttgaatgcccggagaagcagttttatccactgactgtacaattaacctgtatgaatatgaagatcacaacattgatggatatttataattgcctgaaaggttgcggcggcgaagaaattaccctgccggagcatgtcatggaaggtgccggcagatgtatttaccgtatggtagaacttggcggttgatgaatatcatgtattgctgttcacaatcatatactcaaggaataattatgcgtgtgtgaaatattcactgggtattgttgtgtttgaatctatatgagaaattgtaatattataattacttatggcgggagagatttttctttcctgccttgtgtttttttcggaatcatattatactttgagacatgaaaatattacaggaagatttaaaaacaggaaattttaaacatatttatttgctatatggcgaagaggcatatctggttcggcagtacagagaccgtctgagagacagtttgtgtgtagaaggagatacaatgaacacttctgtcttttccggaaaagatatccgaccggcatcgctgatcgatctgtcggagaccatgccgttttttgcagagcggcgtgtgatttttgtggaaaacagtggatttttcaaaaaaagtcccgaagatcttgcagcatatctgggagaactgccggaaaccacgtattttatttttgtggaagaagaagtggataagcgcggcaaaatgtataagcaggtcaaaaagtttggcagcgtggtagaatttaagcgtcagacggatgccgtactgatgcaatggattcttggaaaattaaagaaagaaaacaagcggatcacccgtccggtgatggaactgttcttagacaaaaccggcaccgatatggagctgatcacgcaggaattagaaaaactgctttgctataccatggaaaaagacgtgattgaagcggcagatgtcgaagcaatctgtgccaaccagatcaatggtaagatttttgatatggtagatgccattggacgcaaggagcagaaaaaagcactggatctgtattatgacctgctgatgctcaaagaacctgccatgcggattttgtatctggtgacacgtcatttccagattctgatgcaacttcgggatatgacgggaaaaggctttgacaataaacaaatggcagcaaaagccggtgttccggaatttgccgtacgcaaatatcttggacaggcaaaaagtttttctctggctcagttagaggagatcgtgcgtgccagcgtacagaccgatgaaaatattaaaacgggtcagatggccgatcagcttgcggtagaattactgattatttccacgatgcaggggtaaaatttgttattgtgtataaaatttaaggctctggcacaaataagtgttgcaattacatttttactgtgctagaatcagacgcagaaagacaaagacgtctggatgaattcatccaggcgtctttttgtgttcctggataatttttcggtaacacagagagttgaaatagggaaaatgaatggagtcgcattttccggttattaaggaggattttgaaaatgaacacaggagataccgcttttatgatgatttgctcagcgctggtattttttatgacaccaggtctggcattcttttatggaggactggttcgaagaaaaaatgtagtaaacacaatgatggcatgtgtatccatcatggggcttgccgttgtaatgtgggtagcctttggttattcccttgcttttggtggcaaccacggaggcattatcggagatttccgctgggcattcttacatggcattaacatgtcagaggcaggaccttatgcagacagtatcccacatctggtatacatcgctttccagatgatgtttgccatcattacaccggcactgatcacaggatctcttgttggtcgaatgaaatttaaagcattatttttctttatcgctttgtggtcagtcgttgtatattatccgctggcacatatggtatggggcgaaggcggactgctggcagccatcggatctgttgatttcgcaggtggaaacgtcgttcatatcagttccggtatcactgctttaacattagctattttacttggacgcagaaaaggatataataaagttgcttatcgtgtacataacattccattcgttgttctgggagcttccatgctgtggtttggatggttcggattcaatgccggaagtgctttaaaagcagacggacttgccgcacatgcgtttatgacaagcgctatttccgccggagttgcattattatcctggatgcttctggatgtgatcatggataagaaaccgacactggttggtgcatccactggtttagttgttggattagttgcaatcacaccgggagcaggtttcgtcccgatctggtccgcatttatcattggagcattagtcagcccaatctgcttcttcggcgtaaaactgatcaaacagaaactgaaaatcgatgatgcgttagatgcattcggatgccatggtatcggtggtatctggggcggtatcgcaaccggattatttggaaaatcatcaatcaacagtgctgcacgctgggatggacttgtattcggagatgtacatctgtttctggcacagctggcaggtatcggtatcacaattgccatcgcagtagtcggaacattggtttgtatcggaatcgtacgcatctttacaaagattcgtgtggatgaccgttctgaaaccatcggtctggatctgtccgaacatggtgagaaagcttatccgtccttcaatggttgggattaatacatatatgtgaaaaatattcgatgttctgaaaaacgtgaaagtttgaaaatcagatgatattttgaaaaaatcaggacaatcaaaaggagatatctatgttaatcaaagtagaagcaattataaatgaagaaaaattcgaagatgtcaaagaggcattaaatgccattcatgtcaatggtattacggtttcacaggtcatgggttgtggcacccagcgtggattaaagcgttatgtccgtggttctgaggtagaaatcaacctgttgccgaagattaaattggagattgtagtttcctctgaaaaatgggaagaaaaggtcattgatacgatccaaagaacagcttacactggaaatgtcggtgacggaaaaattttcagctatgaactccgcaccgctaccaagattcgtacgaatgaaaagaatgaacatgcgatctggggtgataagcagcggcaggaatatgcacgaaatccagagacaaaagaaaacctgtaatcgtaatctaccggaaaaataatcttaaagttaaataatcaaaaagaatggatgccattttctgaacagtgtatgtcagaaatcttgacatccattttttgttaacttatgaagcaaaaaggtttgacttcaaatattatgtcatgagcaaaatcagttcatgatctacatttgtcaaccatactagcatgttgaatgttttgcgctcatttcaccatagtcacataattgtaagaataatatacaatcgaaacagattattcagaaaccagttccagccctgtaatatccggttgaatggtgagagagtagtttgtatagtaaaccacaaatcccggttttgccttattcggtttttttacatttttcttttgcagataatcaatttctactttttcattaccacgtcctttggaataaaaagcagccaaacgtccggcttcttcaaacgtgcgatccggcattttacctgtttttgttttcacaagcacatgagaacccggcataccttttgcatggaaccaccagtcattgccttctgcaaatttgaaggtaagctcatcattctggaaattgtttttaccgacatagatgtcaaatccatcggtagaacggtaatgatacggtttgctcttgccctgtgttttctttttagaatatttgtgcttgatataaccgctttccatcatttcttccttgatctgctgtaagtcagcttctgtctctgcaatatccaatgcagtagcaatagaatccagatgatcaatttcaagctgtgtatcctcaatcaaatctgtcaacgcctcatacgtgcgtttcagttttgcataccggtcaaaatactttttcgcattgtcaagtggtgaaatcgtagcatccaacggaatatgaatcgtctcattcgtataataattcaacgcatcaaatcctttgcatccttcctctaactgatatccatacgtatggatcagttcgccgtatactttgtatttttcccgtttttctgtatcttttaactgctttttctgcaggtcgtatttcttacggttacgctccagcagtgttgtgatcacatgacgcagatccgcggatttctgccgcatacgggtatagagactacgctgtgcgtaatagttttccagcacttccgaaatagaatcataggaaactacggtatccgatgcgtaggaagtcaacgggattgccgcatattccaccggttcgtcctgatgcatgatgatatttggataaaaacgaccttcccggatatcgatcatcgctgccagaaagacctctgccagtttttctttctgagcttcattcagagaagcacatggcgcatcaccatctacatctgcccgataacagaattcattcgcagctaacggactgataccagtataagaagtatagattgctttagcaactctgcatggcttggaaagcgcatgctctgtaaaatgttctgccgtttcttctaatggattcatcttgtcctgttgcgccggaataaaataggtgcgccccggaagtacttcacggacagaacttacctgtgcggaaatatgtttgatactgtcaaggatcatgtcattttcatcacaaaagatgatgttactgtgttttcccatcaactcaatgatcagttttttatgccggagatcaccaagatcatccagatgttcgatctcaaacacaatgattcgttccattcccggttgcgtgatcgcagtgatccgtccatttgccacatgttttcgaagcagcatgcagaaattcggtgcggtcatcgggcttggtttatttttatctgaaatatagactagcggcagagaagcgcttgcagacaaaagcagacgtttctgaccgtttgatcccttcatggtaagaagcagctcatccttttccggctgcgcgatcttactcaaccttgcatttgtaaaattttcctgtagttcttttgccagactggcaactacaataccatcaagagccataaaactcctcctaacttcactgtctgaatcacttttttgatgcaaataaaatttttacatatcattttgatacgatttttatttgaaaatgcgtgattcgctaataaaaaatggtagcatgattttggcaaaaaagcaaattaaaactggaaaaaacggaaatggtgtgttattatattggatgtttaaccgtaaaaaatgaaaaagtgaaatatatatgattttacgactgaaataacaagatacaaataacgaagcgaaaggagtgcttttccatgtctgtagaagaacaaaatccgcttgccactcaaaagatcagctccctgattttaaaatttacgattccggcgatcatcagcatgatggtaagttccttatataatatcgtagatcagatttttattggacagggtgttggtatgcttggaaatgcagcgacaaatattgcattcccggtcaatatcatctgtaccgcggtagccttgctgcttggaatcggaagtgcctccaattttaatctgaaatccggtgccggtcatacagaaaaagcgaaaaattatgccggatgtggattatcgttactggtcatctgtggtgtgatcattactgtcgtgacattagcttttttaagtccgctgatgcatgtgtttggcgccaccgaggaagtactgccgtatgcgcttgattatacggggatcacagccatcggtgttccatttctgacactgacaaccggaggatgccatctggtgcgtgctgatcgaagcccgtctttttccatggcttgtatgctgactggtgcgatcatcaatacgattctggatccgctgtttatttttgtctgtcactggggcatcaaaggtgctgcatgggcaaccgttttaggacaggtggtttccggaattatgattttgatctatttctggaaattctccaaaatgaaactgacaaagtctcagttgatcccacggggaaattatgcgaaagaaatagcagcacttggcatggcttccggaatcaatcaggttgccatggcaatcgtacagatcacaatgaacaatattttgcgaaaatacggcgcacagtctgactatggagcagatattccgattgcctgtgccggtattatttccaaagtcaatatgatctttatgtcgattggaatcggtatctctcaggggtgtcagccgattttcggatttaactatggtgcggaaaaatacagcagagtacgtgaaacttaccgcaaagcagctacagcagcggtagtggcaggtattgtatttttcatctgcttccagatcttcccgcgacagatcatttctctgttcggcggaggaagtgaagcatatttccggtttgcggaacgttatttccgtatttttatgtttatgacctttatcaacggcatccagccgatgtcttccggtttctttacctctatcggtaaggcaaaacttggtatgatcgtatctctgaccagacagatcctgtttttactgccgctgatcctgattctcccattaattatgggcatcgacggtgttatgtacgcaggaccgatcgcagatctggcagccgcagtgatcacaatctggtttgttttacgccagtttcaggatatgaagaaaaaggaagccggaaatatttgacttccggtagaaaacattttataataaattgattatgtatagcagtaattatgtgtatacaaaagaattcgagataaagcaggtgcaaaacagatgataaaaagcatgacaggtttcggtcgctgtgagctttccaatgagaagcgcaaaattacagtggaactgaaatcagtaaatcacagatacctggatgttaacattcgcatgccgaagaaactgaactttttcgaatcagcgatccgtactttattaaaagagtatatgcagcgcggaaaagtagatatgttcatcagctacgaagactattccgaacagactctggcagttaaatacaatgccacgattgcaaaagaatatctgacttatctgcagcagatggcagacgagtttaacctggaaaatgatatccgcgtcagcagcttatcccgttatccggaagtgcttacaatggaagaacagtctgcagatgaagacgaattatggtctgatctgtcccaggcaattcgtgaagcctgcacacagtttgtagctacccgtaccacagagggcgaacatctgaagcaggatctggttgaaaaactgcatcacatgcgggataatgtagataaagtagagcagcgtgcgccacagatcattgcggaataccgcagcaaactgatggaaaaagtaaacgagctgcttggtgatacccagattgatgaggcaagattatccacagagattgttttgtttgccgataagatctgtaccgatgaggaaacggttcgtctgaaaagccacattacttctatgttaaatgcattggagagaagtgaaggcatcggacgaaaactggattttatcgcacaggagatgaatcgcgaagccaatacgattctttccaaatccaatgatctggagacttccgacattgcgattgaattaaagacggaaatcgaaaaagtccgggaacagattcagaatattgaataaaaggagcaggtatggcaggattaatcaacatcggttttggaaatgtggtaaatacagataaaatcgtgaccatcattaatccggactccgcaccagcaaaacgaatcgttcagcgggccaaagaatcagaacggatcatagatgcgacccagggaagaagaaccaaaagtatcattctgaccgacagtgagcatgtgatactatctgcacttcagccggagacactggcaggcagatttcaaaatacaaaagaaatgctgtaaagaggagattgaatcatggcaggttcaggattattaattgtaatatccggattttcgggttccggaaaaggaacgatcatgaaagaactgatcgcacgttacccggaagagtatgcattatccatatcggcaaccacacgcggaccgcgtgaaggcgaagaagatggcagagaatactttttcaagacaaaagaagaatttctttctatgattgaaaaaggagaactgttagaatatgcacaatatgtagaaaattactacggtacaccaaaagcatatgtgcaggaacagcttgacgcaaagaaaaatgtcattctggagattgagattcagggtgcattaaagattaaagagcagtttccacagacattattactgtttgtgacaccgccttccgcacagattttaaaagatcgtctgacaggacgtggaacggagacagaagatgtcatcaattccagacttgccagagccgtagaagaagccgatggctgtgaagtatacgattatctggtgatcaatgatgaactggatgccgctgtagagaacgtacatcggatcatccgcggagagcgtcagcgtatgcagcataatcttgacaccattgaaacaataaaaaatgatttaaaacagtttgtgaaaggagatttatcatgatacatccatcttataatgaattaatgaaagtcgtaaataacaacgcagagtacggtgaggagccggttgtaaacagccgttattccattgtgatcgcatctgcaaaacgtgcacgccagattatcggtggcgcagagccgactgtaccgaatgcagcaggcaaaaagccgttatccatcgccgttgaggagttatacacaggaaatgtaaaaatccttggtgaggacgacgatatcaaagaagaaggcgatcgttaatccgtctttttcgggaagaaattccggtctcaagttacatgctgcctgtgaaaaggcagcattgttgtttctggaaccgaaaatttttcaattacaaaatttagtggaggaaccaaatgaaagtattatttatttcacttggctgtgataaaaaccttgtagactctgaatttatgcttggtaaactgacaaagcataaatttacagtgacggatgatgagcaggaagcagatataatcgtagtcaacacctgttgttttatccatgatgcaaaagaagaaagtattcagtcaattcttgacatggcacagtatcgtaccagcggctcctgtaaggcgctgatcgtgtgtggatgtctggcagagcgataccgtgatgaaattttaaaagagattccggaagtagatgcggtgcttggaaccaactctaccgagcagatctgcgatgccattgagaacgtactgcttggcaataaatatgaggcatacgagccactgaccggtattgaaatacacgaggcaaaacgaagtgtatctaccggtggtcattatgcacacttaaaaattgcggaaggatgcagcaagcattgtacttattgtatcattccgtccatccgcggtgatttccgttccgtaccgatggaagaaatcttaagtcaggcaagagatctggcagaggcaggtgtcaaagagcttattcttgtggcacaggagacaaccctgtacggtattgatctgtatggcaaaaaatctctgcatattctgttaaacgaattaaacaaaatcccgggcatttactggattcgtctgatgtactgttatccggaggagatttacgatgaactgatcgaagcaattcgtgacaacgaaaaagtctgtcattatattgatatgccgatccagcacatcaattctgacatcttaaaacggatgggaagaaagacaaaccgcgaaatgttggagaaaaagatcgcagctttacgtgccgcaattccggatattgcgatccgtaccacactgatctgcggattcccgggtgagacaccagagcagcacgaagaactcatggaatttatcaataagaccgagtttgaccgactgggtgcgtttacctattctccggaagaaaatacaccggcagccatctttgacaatcaggtggaagaatctgtgaaagaagactggcaggcagatgtcatggaacttcaggaagaaattattcttgacaaaaatgagaccatgataggtcaggagatcctggttatgatcgaaggcaaagttgctgatgaaaatgcttatgtcggaagaagctaccgcgatgcaccggatattgacggtctggtctttgtcaacacagatgccgaactggtcagcggtgattttgcaaaagtccgtattacaggtgcatatgaatatgatctgatcggcgaactgatctgatatgagataggaggaacttatgaatttacctaataaacttacgatttttcgtgtgattttaattccgttttttgtgtttttcctgctgaccgacgtacttggcgcaagcggggattatctggcacttgtgatctttatcgttgccagcctcaccgatatgctggatggaaaaattgcccgtaaatacaatctggtcacaaactttggaaaatttatggatccgctggcagacaaactgctggtgtgctccgcgatgatctgtctggtagacttaagattgttaccgtcatggattgtcatcatcattattgcccgcgaatttatcatcagcggattccgtctgattgccgcagagcatcagatcgttatcgctgcaagcatgtggggcaagtttaagacaactttccagatggcaatgatcattttgattatcctgaacatcaatgttgatttctatatcgcgggtgttggtgtgatccatgtactggcaacgatcgcaacttatgtagcacttgttctgaccatcgtatccctgatcgattatctgaacaagaacaaagctgttttaaaagagcaggattaatcagatgtaatcaaaaacatctggtttcatttatattatattaggaggtccgctatgagaattatagccggaacagcccgtagtatgccgttaaagacaattgaaggcaaagatacgcggcctaccactgatcgaatcaaagagacgttatttaatattttacaaatggatgttccaggttctgtttttctggatctgtttgccggaagcggtggaattggtctggaagcagtcagccgcggtgcgaaaaaagctgtttttgtcgagaacagtaagaaagccgccgcatgtattcaggagaatatccgttttaccaaatttacatccagttgtgacttaaaatgcatggatgccctgtctgcccttcgtatgctggagcgcagatatgtgtttgacattatttttatggatccaccatacggccttggactggagtatgatgtgttattacatctgaaagattcttccattctgacagaagacaccctcattattgtggaagaatcactggataccgatccttatgagatggaaaaatatggatttgagattacccgcataaaacgctataagacaaatcagcatgttttcctgaaaagaatacagtaaaggggagcgccaaatttacagcgcaaagataaaatgaaaaaagcaatctatcccggaagttttgatccaatgactctgggacatcttgacatcattgaacgttcatccaaaatggtagatgaactgaacgttgccgttttaaagaataatgcgaaaaatccgttgttttctgcggatgaacgtgttagtatgataaaagaatttacatcacatcttccgaacgtgactgtgactgcatacgacggacttttagcggaatatgcagatgagaccggagcaaccattatcgtgcgtggactgcgtgcggtaacagattttgaatatgaactgcagatcgcgcagacaaatcatgccatcaatcccaagattgatactatttttctgacgaccagtcttcagtacgcatatttgagttctacgatcacgaaagaagttgcatcctatggcggcgatatttccaaattcgtcccaaaggatctgattgacagagtttacagcaaattcaacataacgagataaaaaggagagattcaaatgaccagccgtattgaacagattatttctgaaatcgaggaatacgtagacagttgcaaatttcagccactgtcaaacacaaaaatcattgtaaataaagaggaactggaagaattacttaccgagcttcgtatgaagacaccggatgagatcaaacgttaccagaagatcatcagcaacaaagatgccatccttgcagatgcacaggcaaaagcagaagagattctggctcaggcacagattcagaccaatgaacttgtcagcgagcaccagatcatgcagcaggcttacgcacaggcaaacgaggtcgtttccattgctacaaaccaggcacaggagattctggacaaggcaacagaggatgcagacaatatccgtacagctgcaattgagtataccgataatcttcttggaaacctggagaacatcgtaactcatgcaattgatacaaacaaagcaaaatatgacggactgatgtcttctcttcagaactgctacgatattgtaaaagcaaacagaaacgaactgactccttcggaagaagaagcaactgatccggaagcagataccgcttcagaagatcagggagcttccaatgcggaagagtatgatatcattggttctgataacaaaccggagcagttataatacatagcaggattttcgcttcgtttatatcgcatagagtcgacagaccagttccagaaatcctgttgctaaaattgcacatgcaagtttaaaacatgcataatgccgcagggagaatgaaagttgtcgcagcatggaagcagtctgaaacagaccactgataccaccaaaggaaacgataaaaatgtcgatcagatatttgacatgaaagggcaatgcagccccggaagtcagatggattccgttggtaatttccaatagtccggtacagaggcaaagtatcaggtcgttttttattggaaactgttttagaaaatccgcagcaattgcaaataacataatatatccggcgagttttatcattgtagaaaaaccgttcataatgccgtcatcgatgattttcaagcttattgcagatctggatgccggcattttttgcggtcttttttccgacagttgatgttgaactgaaaacagaacgaaacgtccaagcagcaatggtggaagatagcagatcaaaagaagcatccaccctgacagaaaaccgccatttaaagaaagcaccatataattgtacagaaaagccggaccgaaattattgctgatacaactgataacttctgcttcctttgcagtaatcttgccggtgtcatacagatcagcacagattttacttcccaggggaaagccaaatagaaatcctgcaataagtggataaattaacggcgctctgaccggatagattttggaaaaccatggatagatccgctctgacagactgtcataaatgccggaacgcaccataattccggataaaatgctaaaaggcagaagtgtcggcaggacagaatgataccagagggcgagtccaccggcggtagccaatgcaatctgccttggacgaacgatacaatataacaggcaaagggtaaatatcaggatagagaaaatctttttcatactgcattttattagacatatcataaagtaattcctaaatccggagcgaaatatgaaaaagattctgatctggcttgttcttattttctgctgtgcgctgtttgactgttttcttgtaaaaaaattgccgttttcatcggaaataaccattgatccggtattaaatcaaaggatctgtgacgaaatcaaatattttcccattgcatcggatcgtaacgaagcagaattgccctgtcagtatgtggattactggatggcagagcgcacttttggtggaaaccggcatcatgaaggaaccgatttgatgacaaccgaaaacgaacgcggcatttatccgatcgtcagtatgacggatggtgtgattgaagcccttggatggctgcgccttggcgggtatcgcattggtattcgcagttcttccggtatttattattactatgcacatatggaatcttatgcagaggatctgacagagggcagtaacataaaagccggacagtttcttgggtttgtgggtgataccggctatggtgcagagggcactatcgggcagtttgccgttcatctgcatgtaggaatctatgttcaggatgcaaatggagaagatgttgccgtcaatgcttatccctacctgaaaaaagcagaatctaaacagattttggcagattataaaaaacttgcagattttgggtctgccacctataataaatgaagcatataacgataagaaaagaacaaggaacaataaataaatggaaaaacagataaaagcaatgcgaatggataaatttttatcccagacgctgaacgtaacgcgcacagaagcaaaaaaaatgctcaaacagggacgcatcagcaaaaatgaggttatctgcaaagatggtgcagaaaaagtaattcctcagacggatgttgtctgtctggatggaacgccgattcagtatgaacaatttcattatctaatgctgtataaaccggcaggatgtgtcactgccaccgaagatgcacatgcgaaaacggtaatggattatatcccggcagaacgccggcgtaatctgtctccggtaggcagactggataaagataccgaaggattgcttttactgacggatgacggtgccttaaatcaccggcttcttgcaccgggaaaacatgtccccaaaacatactatgccaaaattgatggaacagtgaccgaacgggaagtgacactttttgctgaaggactggagattggagaaaagaaaccgaccgctcctgcaattctggaaattttacattccgcagagcagtcagagattcgtgtcacgattacagaaggcaaatttcatcagatcaagcgcatgtttcatgctgtcggaatggaagtgctttatctgaaacggctttccatgggaacgttacagctggatgagacacttgctccgggtgcatggcggaagctgaccgaaagcgaaatacaacagttaaaggaagaacaatcatgatgttagaaaataaagaagccgttatttttgatctggacggtacgattacggattccatgtgggtatgggcagatattgaccgtacctttttcgaacagcgaaagattccgatgccgccgacgttaaataaagagatcgagggaatgagttttacggagacggcagaatattttatccgtacctttcagcttccggaaacggtagaggaattaaaagatatctggaatcggatcgcactggataaatatgcacatgagacaccgttaaaacccggagccggtgaaattttgaaatatttaaaagagcatcacatcaaaaccggaattgccaccagtaattcccggttattactggatgtgtttttgaaagaacgggatctggaaccgtatatcgatgcagttaccacaagctgcgatgtcaacaaaggcaaaccggagccggatgtctatctgaaaacagcagaaaaactgcaggtaaaaccggaacattgtctggtatttgaagacatcccaatgggaattttggcaggaaaacgggcaggcatgcaggtgtgtgccatcgaagatgattattccatccaccttaccgctgagaaaaaagcgctggcggattactatattacagatttcagacaggttctggatcatacctatgaggatttaagaaaatgaagcaatttttaccaatcagtcgtgccgatatggaggcacagggcatcaaacagcttgatttcgtctacgtgatcggcgatgcctatgtggatcatccatccttcgggcacgcgatcatcagcagaatattacaggcaaacggttttacggtgggaatcatttcgcagccgaactggaaagatccggacagcatcactattctgggcgaaccaaaacttggatttatcgtaaccggcggaaatatggattccatggtaaaccattattctgtttccaaaaaacgccgacagaaagatgcttttacaccgggcggtgttatgggaaaacgcccggattatgcaaccattgtatactgcaatctgatccgccgaacatataagcataatccactgatcattggtggactggaagcaagtctgcgccgtttggcacattatgactactggtcaaataaggtcaaacgttcgattttactggactcaggcgccgacctgttattatacggaatgggagagcgcagtatcattgccatggcagagggactcaaaagcggcatcagtatcaaagacctgacatatatcgatggtacagtatacaaaacaaaagaccctgacagtgtttacgatggcattatgctgccgtcctttgaggatatctgcgccagcaaagaaacctatgcgcgcagcttttatacgcaatactgcaataccgatccgtttaccgcaaaacgtttgattgaaccgtatccaaacaaatgttatgtggtgcagaatccaccggcaaaaccgctgacaaccagcgaaatggatgatgtatatgcactcccttacatgagaacgtatcatccgtcctatgaagaagcaggcggtgtacctgcaattgaggaagtaaaattcagtctggtcagcaatcgcggctgctacggcggatgcagtttctgtgcactgacgtttcatcagggacgtatcattcagacacgaagtcacgaatctattttaaccgaagcagaacagatcgtgcatgatccggattttaaggggtatattcacgatgtgggcggtccgacggcaaacttccgtggaccatcctgtgacaaacagctcaccagaggtgtctgcaagaaccggcaatgcctgttcccgacaccatgtccgaatctgaaagtagatcattcggactacctgagtctgcttcgtaaattgcggaaactgccaaacgtaaaaaaagtgtttatccgttcgggtatccggtttgattatctgatctgtgataaggacaagacctttttccgggaattgtgtgaacatcatgtcagcggacagttaaaagtggcgccggaacacatttccgattcggtcctttccctgatgggaaaaccgccggtagctgtttataataaattcaaagacgaatataaaaagatcaacgaacgtctggataaaaaacagtatctggtaccgtatttgatgtcttcccatccgggttcgaccttaaaagaagcggtggaactggcagaatatctgcgcgatcttggttatatgccggaacaggtacaggatttttatcctacaccgtccacgatctcaacctgtatgtattacaccggtctggatccgcgaaccatgaaaaaagtgtacgtcactaataatccgcatgagaaagcaatgcagcgtgccctgatccagtatcggaatccgaaaaattatgatctggtttatgaagcattacatctggcacatcgtacggatctgattggatttggaccgaaatgcctgattcgtccgaagcatagcggacattcagataatgacagcggatatcgtggacaagcaactggcaaatccggcaacactaatcggggcaaaggttcttacaaaggacagaacaataaccaaaaaggcaatcatacaaaaggtaacaaccgttcccagactggaaacagaccggaaaacggaactgccgttacagcacgtccgaaaaagaaaaaatccattcgtaacgtgcataagaaaaaacagaaataactatttagattacagagctgtgcaaaagaaaatatcatgtattgcatggtgcacatctcacaataagaatgacaaaatcatttttgaatattttatagaaagagaaaaacatcctttatgaaagaattttctatttcatccaaagaagcgggacagcgcatggacaaatacctgtttaaagtactaaatcaggcatccaaaggctttgtctataaaatgcttcgcaagaaaaacattgtattaaacgacaaaaaagcaaccggacaggaagttttaaaggcagaggatcagatcaaaatctatctgtctgacgaaacctttgccaaatttgcttctgcactggtagaaactccggaagctgcatcaaaggtttcagcagcatctgaaacaggcaaagctgttgcaaaaacaacagcagtacgccatccgaaaattcagatcgtctatgaagatgatgatattttgattttgaacaaaccggttggcatgttatcacagaaagcggaaaagaccgattattctgccaatgaacttgtcatcgactacctgttagagagtggtcagttgaccagagcagaacttcgcacctttcatccgtctatctgcaaccggttagaccgcaatacatccggacttttgattgccggaaaaaccatgcatggtttgcaggagatggctaaagctctgaaatccaggagtatgcaaaaatattaccgttgtctggtggcaggacagattaccgaagatgcacatttaaaggggtatcttgttaaagaccacaaaacgaataaagtttctattcaatcaaaagaaacaaaagatgcgtcctatattgaaacagcatatcatccggttcagacttatggaaacacaacgctgctggaagtgcatctgatcaccggtcgttctcatcagatccgtgcgcatctggcaagcatcggacatccgattcttggagatggcaaatacggagatccggcaaaaaataagaagctgcgggaagcctgtggcattcgttctcagcttttacatgcataccacatggaattcccgggaggaaccgtcgttaccgcaccggaaccgggaacttttcagaaagcagagcagtgggcgctgcataccgctcctacggaaaacaacagaaaaaagaggtaagaaacaaatgtatttatatcttatgagacatggagaaacgttctggaacaaaaaaggactgattcagggttcttccgatattgagctgactccttatggagaagaactggcgcgtgataccagagatggatttgaaaaagatcagattcattttcagcgcatttacagcagtccatataaacgggcagtccgtacagcagaaatcattgcagaaaaacaggaagcagacgtacaggtagacatgcggatacgggaaatgtgtttcggaaaatatgaaggtgagaaaatcaaagcggtaaaagaagtagatgaaaatatcgcgaactgtttccatcacccatccctgtatatggcagatgagaccgcagattcctttcaggatctctatgaccgcattgccgcatttttaaaggatgaggtagttccgatggaacaggatccttccattgaaaatattctggtggtttgtcatggtgctgtcatccgggcatttctgacctatcttcgcaagatgccgttagatgaattctggtcgatccatcaaccaaactgctgtgtcaaccggattcgtctggaaaacgggatctttacgattgaaaaggaaaatatcttatattatgacgatccggaactgctgcatcggggagtactgtaatgccaacctggaactcccgcggactgcgtggctccacactggaggaatttatcaaccgaaccaatgaatgttaccgggaaaatcatctggcactgatccagaaagtcccaaccccgatcacacctatcaaaattgatcagcagaaccgccatatcacgctggcttattttgatcagaaaagtaccgttgattatatcggtgcggtacagggcatcccggtctgctttgatgcaaaggaatgtcagacggatacgtttccgctgcaaaacattcatcagcatcaggtagactttatgcaggaatttgaacggcagggcggtatcgcttttttcctgatcctttactctcaccgggatcagttctattacctgaccttccgtcagttagagaagttctggatccgaatggaagaaggtggcagaaagagttttcggttggatgaactggaagaatgttacttttttaccggtcataacggactgctggttccctatctggatgctttacagacagatttgaatctcagggattgacattttaaaggtaatttcatataatgattaaagatttttgtgtgttagcacggtagcacagtaaagtgattccggaaaaatgcgtgaaaaacagttgaaaatggaacataaaggggactgaaaaagagatgaatcaattattacatacgccggaaggtgtcagagacatttataatgatgaatgtgaacgcaaaatcattctggaggaacggctgctgaccgtattaaaatcttacggctatcatccgattcagacaccgacttttgaattttttgatatttttggaaaagaaatcggtaccacaccgtccaaggatttatacaagttttttgaccgggaaggaaataccctggtgcttcgcccggatatcacaccgtctatcgcaagatgcgcgtccaaatattatatggagcaggcgatttcaatccggttgtgctacaccggtaatacgtttcggaataattccagctatcagggacgtttaaaagaaaatactcagtccggtgccgagctgatcggtgatggaagtgtagaagcagatgcagaaatgcttgcactttccgcacagcttttaaaaacagcaggactgaaagaatttcagctgagtgtcgggcatgcagatttcctgagaggcttatttgaagctgccaatctggaagaagatgttatggaagagatccgaaatcttttgttaaaccgcaatctgtacggcgtacaggaagtagtagagcagcatgtggcagacgagaatttaaaacagttattcggtctgttgacggatgttatgctggataaggaaaaaattacagctgccaaagcatgggctgctgattatccgagagtattccacgcactgacacgtttagaagaactggatgagcttctggaagtatacaagatccgcaaatatgtttcgtacgagctggcaatgatatccggattcaattattataccggcatcatttttgcgggatatacattcggaagcggcgaagccattgtaaacggtggtcgatacgacaatctgttacagtctttcggtaaatctgcaccatccattggttttgcggttgtcatcaatcagttaatggcggcactgcagcgacagaacgtacgtattccatttgagaatacaactaaatggtttatttacagtgggcaataccgtcaggatgccatcaaagatgcacaggtactcagaagccgtggcgagcaggtagaactgatgccattaaccgagcagaatacccgggaagtatacgagacatatgccgagcagaatcacattcaggatattattttttacatgtaggaggaccgagccatgagatatttaacatttgcattaggaaagggacgtttagcaaataagacccttgaaatgtttgaaaaaatcggtatcacctgcgaggaaatgaaagataaagataccagaaagctgatttttgtaaacgaagacttaaaactgcgtttcttcctctccaaaggaccggatgtaccgacttatgtagagtacggtgccgcagatatcggaatcgtcggcagagatacgatcctgcaggaagcccgcaatatttatgaagtactggatcttggtttcgggaaatgcagaatgtgcgtctgcggaccggaatctgccagagatctgctgcagcatcatgagcagatccgcgtagcgaccaaatatccgaaaattgccaaagattatttttacaataaaaaacatcagaccgtagagatcattaaattaaacggttccattgagctggcaccgattgttggtctggctgatgtcatcgtggatatcgtcgaaaccggatctaccttacgcgaaaacggactgactgttttagaagaagtttgcccgttatctgcccgtatggtagtcaatccggtaagtatgaagatggagcaggagcgaatcggcaaactgatctccgatctgcgtgaagtaatgaataaaggagaaaactaagatgcgtacgttaaaacttacaaaggaaaccattcagaatatattgacagacctgttaaaaagaagcccgaacaattatacccagtatgaaagcagtgttaatgagatcattgcaaatgtccgcacaaacggtgatacagcgatttttaactatacaaagaaatttgacggtgcaaccgtaacgccagaaaatatcgaagtcacagaggctgagattgcagaggcttatgagcaggttgatccgaaattattagaggttatccgcaaagcaaaagaaaacattcgtgtgtatcatgaaaaacagaaacagtacagctggtttgacagctccattccgggaaccatgcttggtcagaaagtaactccgattgcaaaagcaggtgtgtacgttccgggtggaaaagctgtatatccttcttccgtactgatgaacattatgcctgcaaaagtcgccggtgtagaagaaattattatgacaactccatgtaacaaagagggtaaagtcaatccttccacactggttgccgcaaaagaagcaggtgcagaccgcgtctttaaagtaggtggcgcacaggcgattgcagctctggcatttggaacggagagcatcccgaaagtagacaagatcgtaggaccgggtaacatttatgttgctctggcaaaaaaagcagtgtttggacatgtcagtattgattccatcgctggtccgagtgagatccttgtactggcagatgagactgcaaatccacgttttgtagcagcagatctgttatctcaggcagagcatgatgaactggcttccgcaatcctgatcaccacaagtgaaaaattggcagaagaagtatccaaagaagtagatggtttctgtgaagttctctccagaaaatcaattattgaaaaatcattggaaaactatggctatatcctgattgcaccggatctggatactgccatcgatactgcaaatgaaattgcatccgagcatatggagatcgtaactgcaaatccatttgaggttatgacaaagatcaaaaatgcaggagctattttccttggtgaatacagcagcgagccgcttggtgactattttgccggaccaaaccacgtccttccgacaaacggaacagcaaaattcttttctccgttgagtgtcgatgactttattaaaaaatcaagcattatctcttattccagagatgcattgcatgcggtatacaaagatattgcacagtttgcagactgtgagcagctgactgcacatgcaaattctatccgcgtcagatttgaagacgaagacaaataattcggagggcgaaaaaatggcagaaaaacgcatctcacaggttcagagaaaaacaaacgagacagatattgccctgtctctgaatctggacggaaacggtaaacagaatatttccaccggaattggattttttgaccatatgttatccggttttaccagacatggcttctttgatctggatctgcaggtaaagggagatctggaagtagattgccaccataccatcgaagacaccggtattgtccttggcaatgcgatacggaaagcactgggcgacaaaaaaggcatcaaacggtttggcagtatgatcctgccaatggatgaaaccctggtcttatgtgccattgacctgtccggacgcccgtattttgcatttgacgcagactttacgactgatcgagtgggagatatggatacagaaatggtacgtgaatttttctatgcgatttcctacgccgcaggcatgaacctgcatatgaaggttctgtccggaacgaataatcatcatattatagaagcactgtttaaagcgttcgggaaagcgctggatgatgcttcctcctatgatccgcgtgtaacggatattttatcgacgaaaggcagtttataacgatgaacaaaaaaaatttaattgcaaccatatatttaaaaaacggaaaactggtcaacggtttcaaagatcataccgagcaggatgatctaatcgaacggatccgtctgtacaacgacaacggtattgacaaaatctacctgtttgacctgtccgacaatgacgcggagcatgagctgaatcttcataccatgaaagaaatcaaccgcgtagctgagattccggtttatgccggtggaaatatcaaccgtctggaggatatcaagaaaattttatatgccggatgtaaaaaagcaatcttaaatccggtaaaagatgtgactgcacaggtgtcaaaagaaggtgcattacgttttggcaaagataaactggcattatccatccacaatgtggacctgttttttaaacagaaagaagatgtagaaaacaacacaagtgagctgatcgtgcttgacccggcactgatgggaacgcttggcaacgttaccgatatgccatattccatgcttctgacagagactgacaacgagagcgtctgcaaggcattacaggcagatgaaactatcactggtgtatcttccagaaccatcagtgcctatgatgcagatgtaatgggactgaaagcatatctggcagaacagggaattgcaaccggtcacttagaatcttcctgtgactggtctgagtttaaattaaattccgatggtatgatcccggttatcgtacaggattacaagaccaatgacgtactgatgcttgcttacatgaatgaagaagcattccagaccaccctgtctcttggtaaaatgacttattacagcagaagcagaaatgaactctggacaaaaggcatgacttccggacattatcagtatgtgaaatctttatccatcgactgcgacaaagataccattctggcaaaagtttcccagattggagctgcctgccataccggcaaccgcagctgcttctacaccgatatggtaaaagaagaatacaatgagaaaaatccactggaagtatttgaaaacgagtacaatctcattctggatcgcaaactgcatccgaaggaaggctcttataccaattacctctttgacaaaggaattgataagatcttaaagaaagtcggtgaggaggcaacagaaatcgtcatcgctgccaaaaatccggatccggaagagattaaatatgagatcgctgatttcctgtatcatatgatggttatgatggttgataagggtatcacctgggaagaagttttagaagaactttcacagcgttagagcatttagttttgaggattttagcaattctgaaaaaatatgtcagcttatgttgttcagaatcgcgtaacatatcttacgtgtgttcggctttaaaactttcggaatataaaaaagacaaccgcatatataaatacaaaaaggctatgattacaaaaacgtaatgatatgccttttttgtttgacgaaaaacttatcgaaacattgttatggtttgagaaacaacaaacaggagggtatggtatgcagatagaacaatatgaaaatcgaaaaaattatgtagaatccgtaaaaaacagctttgcctcaccggggaaaaagacttatccggaagaacaggaaaaacgtccccgaagttttcttggacttcggtttgtgctggcactttttctgtttttaggtttccttggcatgcgtcagaccgatttttcctggcattcctggaacgcagaaaagattacacagcagatccaaagttccatcaaattccctcagattctggaagtattaaaccggttataaaagcttaaccagacagtttaaaaattttgcagtgaataaacgcaaaccagaatggatccattactggaaattttatactttctttcttgcttctcatttgagataaaactataatagaattaacattttttataaattacacaggagaaagattatgtcatatatcgattttgaccatattacaaaagaatataattccggcggaagttccattttcgcattaaaagatgcttctttttccgtggaaaaaggggaacttgccgtcatccttggcgcttccggtgccggtaagacaacggcgctgaatatccttggcggaatggatactgctacatccgggaaagtgctggtggacggcgcagatgtcaccgcttttggcaaacgccagcttacccagtaccgacgcacggacatcggttttgtctttcagttttacaatctggtgccaaatctgacggcattagaaaacgttgagctggcttcccagatctgtgaggattctttagatgccgcacagacgttggaaaaagtagggcttggcatgcgtatgaaaaactttccggcacagttatccggcggcgaacagcagcgtgtttctatagcccgtgcattggcaaaaaatccgaaacttctgctgtgcgatgaaccgacaggagcattggattacaacaccggaaagcagattcttcagcttttacaggatacctgcagaaaggaaaaaatcactgttctgatcatcacccacaattccgcactggctcccatggcggaccgcctgatccagtttaaaagcggaacggtgatcagtgaaaccagaaacgaacatccggtttcgatttcagaaatagagtggtagtgtaggacaaatgaaagcatattggaaagatatttttcgaacaatcaaacttgagaaaaaacgatttttctccattttgctcatcacatttcttggcgtgacaatgtttgccggattgtcggcaggctgccgggatcttcgtgcttcggctgatcgtttttatgatgaacagaaattatatgacattaagattcagtccacctttggtctgaccgatgaagatgtggaggcactctcccaagtcaaagaagtagccgaagcacatggaacttacagtgagaccgttctggtacaggcggatgatctgcaacagaaggcagatgtaaaattactggatgaaaacggattaagccagccacgtctgttagatggcacgatgccttctaaggcgtcggaaatcgctgtatcccaaaattattgtgcagacaccggcaagacgatcggagatacggtaaccctttctccgcaaaacagcgaggatgccgatacaacctctgccttaaagcaaaaaaactatacaattacagcggtcatgctggatgcaaccgatctgatcgccgataaaggagcagcgtcgtttcgttcttctcagtcatccaaatatttcttttatgttacgcaggaagctttggataacgatgtttattctgctgtggagcttcgtatcaatggggcagaagcgttatcctgtttttccgaagaatataccgatctggtttcagacataaaaaagcgcattgaaaaagaaatcaaatccgaccgggagcaggcgcgctatgattccattattgcagatgccgtgagcgagctacatgatgcaaaagacgaagcagcagaaaaatttgcggatgccgacgcacagattgcagatgccaagacagaactggcagatagcagaaccgaaatctgttccggctggcagcaattacaggacggtatgaatcagttacagcagcaaaaaaacttagctgcacagaaattcaaagatggatatgctgaactggagaacggctggcagcagcttcaatccggaaaacagcagatcagtgctgcaaaagaagaattaagcggacatacagatcagctgacacaggcttctgataccttaaagcagcaaaaacaggaaacgcttcagaaactgtccgatgcggaaacaaagcttacagaaggtcgaacacaggcagaatccggaaaagaacagattcaggcacagatttcttccatgcaggcacaatttggtgatgcatggccgcagagcgcatgggaagcttacgaagccagtgtaacttctggcaatccggatgcagacgcaagggctcaggtaacagaacagttacaggcatcaatagatgcagtctgtgcacagttaaacggacaattggaacttctagatccatctgccgaagattatgaaacacagaaagcaacactggaagcacagattgctcagatacagcagatcccatcgggactttcgcagttacttccacagtatgagaccgtttccgcaacccttgtggagctggatacgcaggcagcttccctgaaagaacaaaagcagcaggcgcttgctcaatttgattctgcggagacacagttacaggcacaaagtcagcagttagatgcagcaaaagagcagttacagcagcaggagcagaaattacaaacttcagaaacgacactgactgccggtctgaaggaactgcagacacaggagcagaatgcaactacacaatttgccagtgccgatcaggaattacagaaaacaaaagataaactgacacaggcggaacaggaactgaaagatggttccaaggaactggaagaacagatccagaagctggaagaagaacgtgcgaaagcagatgataaatttgcagaagcacaggcagatattgatgcgatcgaccgtacaaaatggtatgtacaggatcgcagttccgtgggaagttacaccacgatccagagcgatgctgactccattgaaaccattggaaatgtatttccaatcctgtttttgtccgtagcgatcctgatcagtctgaccaccatcacacgtctggtagaggaagaacgcggacagatcggtatttataaagcacttggattttctgaccgtaaagtatatggaaaatacctgatctataccttatccgcatgtatttgtggtggtttgttaggagacattggcggatttatcctgttgccgaagttcctgtttatggtatttgacaccatgtataagattccatcctacacgtacctgttccatgcaggctacggcatcagcggtattttactgtttgttacaggtggattatttgcagctgtctgtgcctgccacagcgaattaaaacagtgtccggcggcattgatgcgaccaaaggcaccgaaagcaggatccagagtatttctggagaagattccatttttatggaaacgcctgtctttcttaaacaaagtaactttccggaatttgttccgttataaaaaacgtctgtttatgactgtcagcggtattttaggctgtacggcattacttgtcgttggaatggcaattaaaaactccgtcacagatctgatgccaaaacagtatgaacatatttcccgttatgatctgatggcagtcacaatagcagatgatttcgacaattttaccaatcagatttcttctgatgatcagatccaggattatctgtccctgcagacagacagtatacaggttgttaatgattcttccgaagaaactattccgctctatatcattccggatgatgccccgattgaggactatattcgtctggaagccttagacggaagtgaacgggaactttcggatgctgatattctgatcacgcagaatctttccgaagtcatggatttttctgtgggagatgacttacatatccagaacagtgatctggaagaatgtgacttcccgatcagtggtattgtccgcaactatctgggaaatgctatttacatcagacagagtcgctatgaggcactgattggaagtggttcctatgcagcaaattccattctggctcatttgtcggattcctgtacagatccggttgcttatgcagaccagctttccagggagagtgatgtggtatcctgtaacagtgtacaggcgatgcgggatgaattttccaaatcctttggattgatcaactgtgtcgttgttcttgtgacagcactggcagcaggactggcatttgtcgtactctttacactggcgaccacaaatatttccgaacgtgagcgggaacttgccaccatcaaagtacttggattttttgataaagaagtccattcctatgtcaacaaggaaacactgatccttacggttatcggtattttgcttggacttccggttggaagatttttcagcggacttctgaccagtgtactgaagatgccttccatctattttgcggtatcggtacacccgtccacgtatctgttcgccggcggcatgacattcctgtttgcactggcagtagatctgatcacaaaccgtctgctggatcatatcaatatggtagatgcattaaaaagcgttgagtaaacttgacgctttttcgtgctgtatgctacaattagaaatcgcgcagattcattgtataaaaaataacgaaaatatttcttgcacatacaataaaatctgctttttaaggaacctgaaaaacacaggataaataaaatgataaggaaacacagaatgaataataaacttgcattaaaggatgaaattttattaaccatagacaagcctgcccgttatatcggaaatgaggtaaatatggtgcgcaaaaatccggatgatgtcaaaatccgtgtggcatttgcctttccggatgtctatgagatcggtatgtctcatcttggcattcagattttgtatcatcagtttaacttaagagacgatgtctactgtgagcgtgtctattctccatggccggatttgcacaaaatcatgaaagaacaggatattccgctgtttgcattggagacgcaggatccgattaaggattttgatttcttatgcatgacattgcagtatgagctttgctatccgaatatcttacagattctggatctgggcaaaatcccgttgaaagcctgtcagagaaccgatgatatgccaatcgtcgttggcggtggtccatgtacctacaatccggaacccatcgctgactttttcgatattttctatattggagagggcgaaaccgtatacgatgacctctttgatctctatgagcgtatgaaagaggatggcagttataaccgtcatgatttcctgcatgaagcagcaaaaatccctggattgtatgttccggctttttatgaggtatcttaccacgaagatggaaccattgcggattttcatccgatctatgatgatattccgacaaccattcaccgtcaggtagtagaaaatatgtcggaatccgtttacccggacaagccgctggtaccgtttatcaaagtcactcaggatcgtgtcgtgctggagatccagcgtggctgtatccgtggctgccgcttctgtcaggcaggtatggtttaccgtccgttacgtgagcgcaatctggaaatgttaaaagaaaaggcttatcagatgctgacaaacaccggacatgaggaaatttccttaagttccttaagttccagcgattacacctatctggaagaactgttgaccttcctgatcgatgaatttaaggacaaaggtgtaaatatctccctgccgtccctgcgtattgatgcgttttcattggatgttatgagcaaagtacaggatatccgcaagagcagtctgacctttgcgccggaagccggttctcagcgtctgcgtgacgtgatcaacaaaggtctgacgaaggaaaatattctgcacggtgcaggacttgcctttgaaggcggctggaataaggtaaaattatattttatgcttggtcaaccgacagaaaccgtagaagatatgaaagctatcggtgagctggcagaggaaatcgcggagcgttattacgagattccgaaggatcagcgaaatggaaaatgccagattacagtaagtacttctttctttgtcccgaaaccattcacaccgttccagtggagtccgatgtgtaccaaggacgaattccttggtcgtgcaaaaatcgtaaatgagaccatcaaatctcagttaaataaaaaaagtatccgctacaactggcatgaggcagatgtcaccatgatcgagggtattcttgccagaggcgacagacgtctttgtgataccatgatcaaaatctatgaaaaaggcggtatttttgcagcatggtctgaattctttgatgagcagatctggctggatgcatttgcagaagatcagattgataccgatttctatacaacaagagtgcgaagcgaagatgagcttttcccatgggacttcatcgatgcaggtgtcaccaaaaacttcctgctgcgtgaatggcatgcagcaaatgcagagaccgttactccgaactgccgtcagaaatgtgccggttgcggagcaatgaaatacaaaggaggcgtatgctatgagaataagaattaaattccgaaaatatggtgtcatgcgttttatcggacatctggatatcatgcgttattttcagaaagccatgcgccgtgccaatatcgatattgcctattccgagggattttccccgcaccagatcatgtcctttgcggctcctcttggtgtcggcatcaccagtgacggcgagtatctggatattgaagtacattctacaaaatctaccgacgaatccagagatgcactgaacgcagttatggtagatggaattgaaattacagaatatgttgttctgcgtcaggatgcgaaaaaagcgatgacttcggtagccgcagcagactatattgtttattttaaaaatcaggttgattttacacaggaagaactggaaaaaaaaatccatcagtattatgaggaacgggaaaccatagaagtgacaaagcagacgaaaaaaagtgagcgtgtcattgacatcaaaccgttaatctatgtattccatccatgtgacttaaaggaacttggctggcagggatttttcctgcagctttccaccggaagcaccgataatatcaaaccggaactggtattacaggatttttatcagtattttgggaaaacctatgatccatttaatatacagatccacagagtggagacttatgagcgtacagaagaaggcttaagaccgctgtatcaggcaggtgacaaccttgaatcataaagtcattatcacagatacgttcatctgtggcagtcagatacgcatgtgcgccacggtatcggaacaacgcttagtggaagtccgctgtcgaaaggtagagcaggaatccattcttggtaatatttatgtaggacgggtacggaaagtggtcccaaacatccgggcggcttttattgagatccaaccgggacttgcctgttattattccatggaagaagcagcggaaccgatttttgtcaaaaagatcccttccaaaaaactggtacagggagacgaactgctggtacaggtgacaagggaaagtgtcaagacaaaagcacctaccgtatcggcaaatctgaatgtaaccggacgctatctggttctgaccagcggcgatcaccggcttggcttttcttccaaactgaccaaactggaaaaagaacattaccgggaagtattatccggttgcaaaaacgaaaattttggaatcattgtacggacaaatgccagagaagtatccgatgaattgctgttacaggaatatgaatcgttaaaagaaaaactaacacagatgattcgcacagccacgatgcgtacctgtttttcctgtgtcagtcggacaccggaaagttacatgaagtatctgcaaaacagttatcaggaaggctttacagaaatcataaccgatctgccggaggtttttgaatcaatccggcagcagcaggagagcgatccttcctttgcacagattccacttcgattgtataaagataatttacttcctcttgctgctctttacaatctgaacaaacagacagaagatgccctgcaaaaaaaggtctggttaaagtccggcggttatcttgtcattgaaccaacagaagcactgactgtcgttgatgtaaataccggaaaaagtgtgacaaaaaaagaccgacaggaacattttttgaagatcaatctggaagcagctgaggaaactgccgcgcagatacgtcttagaaatatttccggaatcgtaatcattgattttatcaatctggaacgtgaggaagatcagaagacggtcatggagcatttaagacgatgcgtccgggaagattccgtaccggttcaggtcgttgatatgaccagattaaatcttgtagaactcacaagaaaaaaagttgaaaaaagtttggcagaacagttgacagaatagaaacattctgatattatacaaaagatgccgcacaacgaggtataagactgcagatcatgcagcaccgaaattggcgagtaatgataaataggaggtgccatatgtacgcaattatagcaacaggtggtaaacagtacaaagtttctgaaggcgatatcattaccattgaaaagcttggagcagaagctggtgagacagtaactttcgatcaggtattagcagtaaacgacggaagtctgaaaatcggcaatccgactgttgagaacgctaccgtagaagcatccgttgtagctaacggacgtggcaaaaaagtaatcgtttacaaatataaaagaaaaaccggttaccacaacaaaaacggtcacagacagtgctttaccaaagttaaaatcgaaaagattaatggttaattgaaattgaaaaggtaacatgtaatggtaaaaataacagtttaccagaaccatgatcagcagtttgttggttttgattgtttgggacatgcagagtattccgatgaaaatgacatcgtttgtgccgcagtatccgtaatgacaatcaactgcatgaattccattgaagagtttaccgatactttgttttattgcgacagcaatgagacggacggaatgatctcttttcgaattacagaaaataatggagcagatgcgcagcttttgctgaaatcgctggttttaggtttagagaacatggagagtaactacgaagaatatattgatctgatcttcgaggaggtgtaagaaacatgatgaacatgaatcttcagttctttgctcataaaaaaggtgtaggttctacaaagaacggccgtgattccgagtccaagagattaggagcaaaaagagcagacggacagtttgtaaaagctggaaatattttatacagacagcgtggtactaagattcacccaggcgtgaacgtaggtatcggcggagatgatacattatttgcaaaagtagatggtgtattaagattcgagagaaaaggaagagacaaaaaacaggcttccgtttatccagtagcaacgaacgaataataaaaccatcaatagactcgacttttatagccgagtctattttctactataaaaaaggaaaaagaaaattatgtttgcagacagtgcaagaattattataaaatcaggaaaaggcggagacggacatgtcagctttcgccgtgaaaaatacgtcccaaacggcggtcctgacggcggcgacggtggaaaaggcggagatgtcattttccaggtcgatgaaggtttgaacactctgacagacttcagacatcgtcgtaaatatgccgctgagaacggggaagagggcagaaagcgtaactgccacggcaaaaacggtgcagatatcattgtgaaggttccggcaggaaccatcatccgtgatgctgagacagataaagtcatcgccgatatgtccggtgataatacccgccagatcattttaagaggcggtcgtggtgggaaaggcaatcagaactatgcaaccgctaccatgcaggcgccaaaatacgcgcagccgggacaaccgggcatcgaactggaagttcgtctggaactgaaagttatcgctgatgtcggactggtcggtttcccaaatgttggaaaatccacgttattatcccgtgttaccaatgcgcagccaaagatcgcaaattatcactttacaaccttaaacccgaaccttggtgtggttgatctggacgagggacagggctttgttatcgcggatattccgggactgattgagggagcatcggaaggaatcggacttggtcatgagtttttgaaacacattgagcgtaccaaagttatgatccacatggtagatgcggcatccactgaaggtcgtgacccgattgcagatatttatgccatcaacaaagagttggaagcatacaatccggaactggcgaaaaaaccacaggtgatcgcagcaaataaaattgatgccatttatgccggcgacgaagatccggtagaaaaactgcgtcaggaatttgagccgcagggcatccgtgtatttgcgatttccgcagtcagcggaaaaggtttaaaagaacttttatatgcagtaaatgaaatgctgcagggcatggattctgaaccggttgtatttgagcaggaatacgatccatccacagcaatgtatctggatgaaccgtataccgtttcctatgatgaagaaacggacgaattcgtggtagaaggaccacgtatcgaaaaaatgcttggctataccaatattgaatccgagaaaggtttcctgttcttccagcgtttcttgaaagatcagggaattttagaggaactggaaggattaggcattcaggaaggagatacggtacgtatgtatggtctttcctttgattactataaataaaaatatataagtctgatcatggaacgtttttgatattttagataagaaactttgcatggtcagcatatggagaataattatgacaagtaaacagagagcttatttaaaaggtcttgccatgaatctggagccgatctttcaggttggaaaatccagtgtgacaccggaaatcgtaaatgcgatctctgaatgttttaacacacatgagctgatcaagctgagtgtattaaaaaactgttttgatgatccgcgtgagattgcaaacgtgatcgcagagcgtactcattctcaggtagtacaggttatcggcaagaaaatcgttttatacaaaccggataaggatgatccaaagatcgttttaccgtaatccggcagaaatggagtatcagatatggctctgaataaaaaaatgggaatctttggtggtaccttcaatccgatccattacgggcatctgctgatcgcagaaaatgcctgtgcacagtttgatctggatcatgtgatctttctgccgacaggacatgctccccacaaacagtttatgggagaggatatgagcgtacatcgctgccgcatggtagaagccgcgatcgcagacaatccgaagttttctatctcatatcgtgaaattcaaaattccggagtaaattatacctatgcaacgttacagcagctgcatcaggaacatccggaatgtgaactgtattttattctgggagcggattccctgtttgattttgatgactggagacatccggagctgatctgtcaatatgcaaaaatactggcggcagtgcgcggaaactgggatgaagagcgggtggatggtcagattacctaccttcgtgagaaataccactgtgatttctaccgtttaaacacaccaaatttcagtgtttccagcaaagagctgcgtgatcgtgccgcaaacgggcagacaatccggtatatggttccagatgttgtaaacgaatatatcagagatcatgcactttatcgggaggatccgatatgacaacaaaagaaatccaaaaagatttaaaaaacaaattgaaaccggcaagatacgaacatacccttggcgtgtccgatactgcacagcatctggccaaaatccatggttatgactgcgcaaaggctgccctggcaggtttactgcatgattgtgcaaaatacatggcagacgataaaaaaatcgcactgtgccgggaatatggtgtctctatcagcgatgcggaatacaaaaatccgtctcttctgcatgcaaaatgcggagcgatcctggcagaacacgaataccagatcattgattttgatattctgcatgccattcgcgtgcatacaaccggcgtgccggatatgagcctgctggataaaattatatttattgcggattatattgagccgaatcgcgacaaagcaccacatttaaaagaactgcgtaaactggcagataaggatctggacgaaaccacttatctgattttaaaagatactgtggattatctgaaagctcacgaagatcagaccatggatcctactacggtttccgcttatgaatactacagagactggcataatagccagaacaggaaaggagtctgaacaaatgaacgacgtatcacgtaacatggcaaaaattgcctgccacgcactttctgagaaaaaagcagaagatattcaggtaatcgatatcagtgagatttctgtcatcgcagattattttgttattgccagcgctgcaaataccaatcagttacaggcaatgatggacgccgcagaggaagatctgtacaaagctggattccactgtgcacagaaagagggaaataataattccagctggattttaatggattataaagatattattattcatctgttctctaaagaagatcgtttattctatgatctggagagaatctggcaggatggaaagattatcgcaccagaagatctttaattctttttgtggcttaaaaatttactatttaattttaataagagaacaccagcaatttgtctcagtcgccaacaatcgctccttgagaaaaattgctggtgttctcaatttacactgtgatatttgtaaatttttgcgccacccgaaacaagatttacttgaagaatcggaatgttccgattacttttcccatgatcatgacttctgagacaatgattggatccataaagtcattctccggctgcagacgataatatccattttctttatagaatgtcttaaccgttgcagaatcgtctacaagtgcaacaaccatatctccatcattcgcggtaggctgttgctgaaccagtacataatcgccatccaaaatacccgcattgatcatactttctccctgtacctgaagaataaacgtcggctcgtttggcataaactctgccgggatagggaagtagttctcaatattttccactgcaaggatcggttcccctgctgcaacttttccaacgatcggaacatttaccatttcacgtctggtcagattaaagttctcatctacgatttcaatcgcacgcggtttggtcggatcacgacgaatatagccgtttttctccaatgtttcaagatgtgcatgaacagaagaggttgatttcaattttaccgcttcacagatctcacgaactgccggcggatatcctctgtttaaaatctctgctttaatatattctaaaatttctctctgtttatctgtaatttttccgtatgacatagtgctgtaattctccttcattcatttaacggggattactttcattatacgcagtgtatattattcccgaacgaaaaacaaaagcaatcatttccttctgttgattaaattatagcataccagaatcttgaaatcaaacatatattccgaaaatttgttcgcatcttgttcttgacattcgaacaaacgttttgtataatagcattatcgaacagatgttccgaacaaattatcgaacatcatatattcacaaaggaggagaaacattatgagtacctattccgttatttattatacaaacccatatcagagagcacaggcaaaagctgccgctgcacaccgccagagtgtacgtgccattcgaagaaaaaaagccgcaaagagacaactgatcactgcattgatcctgttttttacaatcatagcttctgttctgatcatcagcaattgtctgcgtgccaatcaggtaaatgcgtcttccgcaaaaacagaaaatgtttactataagacagtagaagtggaagaaggcgatacattatgggatcttgccgatcgctatatgggagagaaatccttcagcagacaggaatatattaagcaagtaaaagaactgaatcatttaagtggagatacaattgagagtggatcttacttaatggttccttatgtagaaacagtttcagaattataattatagcatgttaattgataagaaatattaacaaaatctccatgtgtgttctatgtgcttgtatataatatcatatcaattcaggaatgttactaatacatatgatcaatctgtaaaaacaaacaaatcgaacaaagcgttcgatttatattctctacatgcctgaaaggtataacgctatataaaattcaggtattagacataatagaatattcaagaatgctccggcattcttgttgcgaggtgcgcagttgaagtatgtcatgcaattgcatgacatacttcaactgcgcacctctgtaatcctgccggaggctataaccacatgatttagagttattcacatgcatcacgtataaagtaatatttttatatattggcgtttggataataatatagcacttaaccgaacaggagacgaacatgcagcaatcagaacaatttttttctaataaacagttaaaacgaatgatcattccgctttttatcgaacagacaagacatctggtaatctggctggttctgattcacaatattgcaaatgcggttgtttttccatttgcggatcctctgggaaaaggactacgtgctaccggagatgtacgatttatcatgggtatttccctttttacaaccattggcgtgcgattcgttttatctgtactccttggtatctggtgcaatcttggcgtaatcggaattgctctggctatgtgtcttgactggctggtgcgggcaatcattttctggattcgctacaaaaaaggcacctggcaaaagtttcaggttatctaaagcctcaaaaagatactttcatgctagttgccgccaacaggaacacgcgttctagaattggtattttcatactattaggataactgatagtaattctttaggaattccagaaactgtcctgcaggttctgacagatatcgaacaggtgaatacacaatatacagttttcgcagaaaagcttcttctcccaatgggaagatcagtagtttaccctgtttagcatcagaaacaactgtcgcacgggagagaatggaaattcccattccaagtttgatacatttttttaaggaaccggcatcatccataatcgcaataacattcagatcatccaacgtaagccctctgtttttcaaaaaatggagggtttcctgttttgttccggaattatcttcccgcaataaaaatggttctttcagcagatcgtccaatggttctttctgttttgtaaaagcctgatagtaaggtgtcgcgggagtagcaataaccagttcgtctgatgcaaaaggcaaaaattcacaggttgtatccgaacaggtggttcccacaagtcccagatcacaggtgccatcatctattttgtgaataatttccagactgtctccacaggtggtatgaaacgttacgtccggaaattcatcatgatatgctgccagcaattccggaagcacatagagcgatggaacagatgacaccccaatctgtaatttatttgttccctcattggaaagctccaatacagctttctgctgtaatgtcaaaatttcagaagcatattggtaaagtttcatgcctgccggtgttacggacagggtttttgttgttcgttttaataactgtgtatgaaattcctgctccagagaacggatatgtgcactgactgtcggttgggacaagtacagtttttgtgctgcctgagaaaagctctggtattttacagtatatacaaatgcttctagttgtctgatgtccatatctatgcttcctttccagatattttgtgtatgaaaatcctgatattcctgtatatcattttctctaccacaaaatttaaatcatattcatctcagtctgagttgagactcccacttctgcaagtggtgagtagtaacaagtatttctcagtgggagtttaatctccgactgagataaatgctccgcgagggcgcacattgtctgggagataatggttttgcgccgaccggaacggagtgtagagtgcagtgattctgaaaagaagatgtcagcttgcgctga

SEQ ID NO: 13368 - DNA, 18528 bp, Unknown
  gut microbiota DNA sequence
gttcatataatggaatttatatcctatcgaaaaatcgatataaactgtttctaatctgattttactcctatttatagtttttctcaatatatttattcaagttatcaatattaacaattttactggaaaatgcaggaatgttatactgaatacaacaaaaacagacgtagttatgcgtcaaaaacacaaaggagaactgttatgaaactatttaacaaaacatggaagcttgcaatcgcaggtgccattgtcggtgtactggcagcattgcttgcattcttcggaaacccggcaaacatggcaatttgtgtggcatgttttatccgtgacacagccggagcattaagcctccattccgcagcaccagtacagtatttccgtccggaaatcgtaggatttgtagtgggtgcatttattatttctctgatcacgaaagaatacaaagcaaccgctggatctgcaccaatgatccgttttctgcttggaatgatcatgatgatcggtgctttggtattccttggatgtccgcttcgtatggtaattcgtatgtctgccggtgatctgaatgcttatgtagcactgatcggttttgcaggcggcgtggcaaccggaaccttcttcctgaaaaaaggattttctcttggaagagcttatgaaaccaagaaagcaaacggtatggtattgccgatcgcgttaatcgtattactgatcatcggtgtggcaactggtgcatatgcagcaagtactgaaggaccgggaagcatgcacgcaccgatcgcaatttcactgatcgtcgcactcatcattggtattatcgcacagatgagcagaatgtgcttcgcaggaagtatccgtgatgtcattctgatgaaaaactttgacctgatcagcattatcggtgcactgtttgtcgttatgttaatctacaacattgcaaccggaaacttccacttaagtttctccggtcagccaatcgcacattcccagcatctgtggaacatccttggcatgtatgtggtaggatttggtgctgtactggcaggtggatgcccgctgcgtcagctgatccttgcaggacagggttcttccgatagtacagtaacattccttggaatgctccttggcgctgcatttgcacataacttcggtcttgcaggagcagcagcaaaagccgcaactgagactgaggcagcagttgcaggtggtccggctaccgcaggtaaagcagcagtgatcgcatgcattatcgtattatttatcattgcagtaacaaacaaaagaaatctgaaaagaggaaaataaaaatggcagaattcattgaagtagatgtaagaggactttcctgtccggaaccggttttgcttgtcatggacgccatggatgaacatccgggtgaaaccattcgtgtgatcggcgatgaagcccacacaagaacaaacattgaaaaaacattaacctatcagaaaaaagagtttcagaccgaacagaaaaacggttgctttgaaatcacatttcgggcataataaggaagcagaagattaggatatttgttatatgatcaagtaaaaaactgattttatcatgaaataaatctgttcatgagtaacatttgtcatgcatcaatgataccagcatatttgcttaattacgctcattacatatagcaatatcagaattgaatcacatcaagaaacggagaattatcgtcatgcgaaagaaaaaaccttatcagattttaacatttcatacaacatccgctgccatggctatggaactgtattgtaaagaacatgacatctccggtcgtctgatcccagttccaagggaactttccgccggctgcggtctggcatggcgcatagaacctgaggaatacgcccgctataaagacgatttacttggttctcacattgaaatcgaacaaaatgtggaactggtcatttaaccaataaaaagtctctctgtttccgctgtgtaaatcagtcagcagtagaagacttgtccataaccaaaaccttaaagcaaaaaatccctctggagagaacaattcttcagagggattcctattttcaattcgtataactatctaccaatggcaattttttaacattcaagaatgctccggcattcttgttgcgaggtgcgcgtcatgcaattgcatgacatacttcaactgcgcacctctgtactcctgccggaggctatatcagatgggggattggctcccaccactgatactagcttgtttctcaccacctatagaggtgggagtcatctcccatctgatatatctaaacatatcttttatggattaagaaataagaatcatgaatatccttctttaccgccaattccatcagatttttctgtcgttttcatccaattctaaccgcataagaaccagttcttgccagcgtccatctctgcatcgaaaacctcttgaatttctgccatattccacaaaaccatgcttcttatataaattaattgcactttcattttcagaaacaacttcaagctctaactgtaaaaagccggcatttttcgcacattcaatgctggcttttgtcagtgcatcaccaatgccaagtccccagtattcttttttgatactgataccaaattctgcccggtgccgcattttcgcacaatcccggatcagattgttaccggcagaaccggctaattttccgtctacaaaggcacagatttccacatccgttccactgcattttgtttccttcaattgccgttcaagagaaatgatatccatggtacattcatccggataggtaagaaggaagtccgtttctttatgtgtttgcacaaaataatcatgatgccttactgcatccgatgcttctgcatttcgtaagatacatttttgcccattttttaatactattggttgataaaaaaacatacgtcctccaaaacatttttcttaagtatagcacaaaatgcaaagaaaataatttgattttttcttaaatataagtcattctaaatgattgttggtgttacgagacagtcttacgcaaaatgggagcagggagattctgttccggatattgaaaaatgcgataaactggcaaaattttacggcatcaagatcgatgccctgatgcattatgatgaaaaagtcggaaatacaaaagtaacacctccaccagaaggaaaatttctgtggggaacggtaaaaatgggaagtcggggacagattgtcattccaaaggaagccagagaaaattatgggctgagcgaaggatcgcgcctggtggttcttggtgatctggaaggaatcgcattgatcccggcagaaagatttgaacagcagttgcgaaatgcaatggaacagagcagaaagattgtggaggaataagttatgacatgtccgaattgtggaaaagaaatgagaatgggataatagcataacaacattttcctgtacctgaaatagagataataacacctataaatttaacacatttctcctaaataccaacctatgagaacaaaaatgtatttgctagaataaaatcatacaaaaacaggattgcaaagaaagcatacatctcataatgaagggagattataaaagtggaatcaaaagcattacataccattcaggtattagcaaaaatcggaaaatattgatggtagacgtttattcctacaaaaagtaaaaaaattttccttgacatattttcgcattgtcatatatattagaattaataaaagggagtaacctacgtgattccacgtttacgatgtcgtcagtacgatgtgaaccatccggtgtcgtaaggaaacggtgagacttttattgcacattgattgtgcaataatggtctctttttaagttcaaagattcctgaacttgcataatcgaaacgcagattgtagataacaaaatgcaggtaaaaaggaggatttaacatgaaagaaatgtatcagcttaccgccacagaagttatgaatcactttgacagttccgcacaggggctgacatccacccaggcagaagaacgccgccacacatccggctggaatgaactgacttctgccaaatcgaaacctttatggaaactttttctggaacaatttcaggatttccttgtcatcattctcatgatcgcagcagtcatatccggactacttggtgacacagaaagcgccgccgttattctgatcgttatcacattaaatgccattcttggaacgatacagacccgacaggcagaacgttccttgaacagtctgaaaaacttatctgcaccaaaagcctctgttcttcgcaatggaactgtcgtgcagcttcctgccagagaactggttccgggcgatatcgtccttttggaagccggtgatgtcgttcccgctgatggacgaatcatcgaatgtgccggtttaaaaatcgacgaaagcacattgaccggtgaaagcctcagctctgataaaatcatcgatgcgatttctgagcaggcagctttgggcgatcgcagaaatatggttttttccggcagtttcattaccagcggtcgtggggaaattgtcattaccgacattggcatgcacacggaggtcggtaaaattgcaaatcttttgcacaatacatctgcaaagcggactccgctgcaaacttcacttgattctttcgggaaaaagctgtctatcgccattttgatcttttgcggcattttgtttggaatcagtgttttgcgtggggaatccgttggaaatgcctttttgtttgcagtcgctttggcagtcgcagcgattccagaagcattaagctccatcgtgaccatcgttttatcttttggcacacaaaaaatggcaaaagagcatgctattatccgaaagcttcaggctgtagaaggacttggaagcatctctgtcatttgctcagataaaacaggtactttgactttgaacaaaatgactgtggaacactattatgtgaacggagagaccagtcctgcaaaagacgtaacatcttccaatctagctaataaactgttatatttcgccagtgtattgtgtaatgatgctaaaatcgaaaatcaatcaacaaatttcacaacaccagaaaagcagtgggattccaacaataaagacaataaaaataatagcaaacagataacctcaacggatttgggaaattttgcgacttcagcaggaaataataaaaatacatcttcagcaggtattggcgatccgactgaaattgctctgctgcaaatggaacatcaaatgcacattcccatttcagaaatacaggtaaaatatccaagaatcgacgaacttccctttgacagtgaacgtaaaatgatgtcaacattgcatacatttttccaaacggagcatacttctgattccaaagaaaaacagcttttgattgtaaaaggagctgtggatgtgctgttgcagcgtacggatgccgtctggactgaaaatggagtcgttccgttaaatatggaagaacaaaatcgtattcaactgcaaaatcagaaatattccgaacagggattacgcgtacttgcatttgcttatcgggaagtttcagatattacagaacttacctttgatcacgagtatcatctgacatttcttggactgattgctatgatggatccgccacgtccggaatccaaagaagcagtaacaacttgcatcaaagcaggaattcgaccggtcatgatcaccggagatcatattttgacggcatccgctattgccaaacggattggaattctgacaccagacacaaaagcatgtgaaggcgctgctcttgatactatgtctgataaggaattgcaggaactggttccggaaatatccgtttacgcccgtgtttcaccagagcacaaaatccgcattgtccgggcatggcagacacggggacatatcgttgctatgacaggggacggtgtcaatgatgcaccggcattaaaacaggcagatatcggtgtagctatgggcggcacaggcaccgaagtcgcaaaagatgccgccgacatggtcctgacaaatgacaatttttccacgatcgtatccgcagtaaagaacggtcgaaatctgtatcaaaacattttacatgccattgagtttttattatctggaaatatgggtgccattttaaccgtattgacagcatccattaccggacttccggttccatttgcaccggtgcatttgcttttcatcaatttactgacagacagtcttccagcgattgcacttggcttagaaccacacacagacgatgtaatgaaagaacatccacgcactgccacaagttctattttaacccgttcctttctgaaaaaaacaggtttggaaggacttgtgatcggaatcgtaacaatctgttccttcctcactggattgcagcagggaaacgcagtacttgccagcacctgtgcttttggaacgctttgcctggcacggttgtttcatggatttaactgtaaatctgaaaaacctgttttatttacggaaaagatgtttcacaataaatggctgcttgccgcatttggactgggagcagctttgattaccagcgtgctgatgtttccgggattgcaggcacttttcaaagtacaggcattgacaatgccacagcttggtatggtgtatttgtacgcatttttgagtctgccgattattcagttttgtaagtggataaaaagtagaggagaagagtaatcacaaaatattctgattggtcaagaaataaagaggtacttaatatgaagtttcaaaattttatcgaaaaaaataaatatttactgctgataattgccattttacttatcctgctccttgggaaaacaaacaccgaatggaacctgctgcatactatctgggaaatcctgctgccattcctgatcggctgtattatggcatttatcctaaacattcccatgcgctttatcgaaaaaagactgctccgtcaaaaatcgaacagatatcgaacttccattcgaatcatcagttttttattaacgctattgatcgtagttgctgtcatctggctgatgctgttttttatgatcccgcagctgacacaaagcttttccatgctcagtgaaaatatcacagattttgtgccacaatttcaatccagcatagaacacttgaacgaaaatgctcctctgatcggacatctgactggaacgcaagcttttgatacgcaacaattgctacaggcaatctctgattttttgaaagacagtgccaaatcgattaccggttcgaccatttctgccattggttcagtatttcagggaatcgtaaccggatttctggcatttgcctttgcctgctacctgttatttcaaaaggaaaagctgcaaatgcaggtaaaaaaagtgatttatgcattttgctccgaagaaaaagcagtaaagctctttggtatctgtagcctgatttccagaagttttacacgattttttaccggacagtgtctggaagcattaattcttggcggactattcttactgacattaacgattttccgtatgccttatgcgctgctgatcagtgtggtcattgcaagtaccgcactgattccgatctttggcgcttttgcaggctgtattttcggattttttctcattttcattgtaaatccgaaacaggcgattttttttctgattctgttttttgtattgcaacagattgaagggaatctgatctatccgcatgtggtaggaaattctgtcggacttccatccatctgggtgctgttagcggtgatcgcaggtggaaaacttatgggaattgtggggatgtttctgtttattccactggcatcggtatgctataccttgttccgtcagctggtatatgaaaaattaaagaaaaaactgaataaacatgaggtaccataaaaccataatttgacgatatgatattttatgcaccagcacatcatatttccttgttttacgattttttatatctgaatgcacttcttgaaccagaaaatcaggaagtaaaggatctccttttatcaggagaatataccgcttttacggatttggcaacgagctcattgaactgtcaagccagatccgcagcaatttttgttggtctggtcaaggcgggactgattcatgaagtcagggaatattcttcctatctgaaattatttagaacacaggagaatggaaaagcagtagacgcaaatgcatatgagcgtgtccaacttttgaataaaaacaaagtgaaactttttacaccagttgtaccatgcagattcacaaaggcagatgtggaaaattactacacacttcactgttacacactgaataataaaaaagaagcagacaattatcttgatctgagatgtggctgaaagtcacaaaaggtatttctaaagctcattcatactggaaatcatgaaacgctcagtatgaatgagaagattaccttgttaaaaccccaaattatatcaaatatgtatgcggtactttattgttacgtccttatcatttttctctttttgaaatgctgcatacatgtttacctatcattttataatttcatcagaatccaacaaaatcgtaaatggtccgtcattgagcagttccactttcatatcagcaccaaaacttccagtctctaccacagggacctcttttttgcaggcagcaatgatatattcgtataagctatttgcaagttctggatttcctgccttaataaaagacgggcgatttccttttttgcaatctgcatataaggtaaactgagaaatcagcagcagttcgccatctacgtccttaagtgccagatttgtttttccgttttcatcctcaaaaatgcgcataccgatcagttttttgatcattttatccgcgatttctgtattatcttcttcagaaacaccgatcagaaccataaatccttttccaatttttccgatcacttcattgtctacggttacggaagcgtgctgtacacgctgaattacaaatttcataacttcaaaatcctttctctttaaacctatagaaacaaatacgtgtattatttttacttcttcatgcatacacatagttctattcacatctgcataatacaaaacaaatgttcgaaaaggtttaccaaaatgttattatatgttatcatagtatataattttcgacacaaaatcaatatagaaacggggaaacaatacatatgaaattgcagcagctgctaagtcttaccagaaaagcagtagatacttataaattaattgaggaaggggaccgcattgccatcggcgtatccggcggaaaggactctctggcgttactatatgccctgcacggtctgcaacgtttttatccgaagcattttaccctgacagcggtcagtgtagatcttggcatggaaggttttgatctgagtccggtcacgcagttttgtgaagaacttgacatttcacatcatatcgtaaaaacacagatcggacagattgtatttgaagaacgcaaggagaaaaatccatgttccctgtgtgcaaaaatgcgaaaaggtgcattatacaacgcagtcaaagagcttgactgcaataaagtcgcttatgcgcatcacaaggatgattttattgaaacaatgatgatgtccatgatttacgaaggacatttttactgtttcccaccaaaaacctatctggaccgcatggaattgaccattatccgtccgtttttgtatgtggaggaagcagatgttatcggatttaaaaataaatacaaccttccggtagtaaaaaatccatgtcctgcagatgaagcaaccagacgtgaatatgtcaaacagctcatccggtccatcaaccatgaaaatccgggggcaaagacacgtttgtttactgcattgatcaacgggcatatcccggactgggaaggacaggaggactgacatgaaagaacgaaaatacagtgatcagattaatattgaaaacgagcagaaactccgcgcgctggtagctgaactgccgcatttctgtcgggaatattttatcggtattgagccgtcaacgtcttcccgtacacggattgcctatgcctacgaccttggcgtcttttttcactatctccatgaaaacaatgccgcactttcaaaaatggagatcgtcgatttcccaattgatattttggagcagattacaccgatggacatcgaagaatatctgcaatatttgaaattttatcatcataatgggaaagaatataccaatgacgaacgtggtcaaatgcgaaaacttgcctgtctgcgcagtttttacaattatttcttccgcaaggagatcattgaaaaaaatcctgctgcactggtgaaaatgccaaaacagcatgagaaaaatatcgtccgtctggatgtggatgagattgctattttactggatgaggcggaatctggcgagaagttaacggagcgtcagaagatttatcataacaaaacaaaaaaacgggatatggcgattttgacgcttttgcttggcaccggaatccgtgtttctgaatgtgtcggtctggatctgaatgatattgatcccaaaaacaacggcattaaggttcaccggaaaggtggttccgaggttatggtatattttggcgatgaagtagccgaggcgctggatgcctatctggatgaacgattggaaatggagccgaaggaaggcagtaccgaagcggtattcctttccatgcagaacaaacggatcaatgtacgcagtgtggaaaatctggtcaaaaaatattcccgccttgtgacaacggtaaaaaatatcacaccacataagttgcgcagtacctatggtacgacactttatcaggaaaccggtgatatttaccttgttgcagatgtgttaggacacaaagatgtcaatacgacaaagaaacactatgcggcacaggcggacagcaggcgccggatggcagcaaaagcagttcgtctgcgggaaaaacaacctgattctgaagaagaataatattccttatgtaagtgtgctcataaaaaatacagataccaaatacatcgatgcacttatcttaataagtatgcttattaaaaacaggtctaacaaataaacggttgcactgattgaaaaaaacatgccctgattcgcaatcttacccttgtgcattatttttcagtgtgctataatttgattcgatattgagaaaagcgatgaaagaacaagtactgtatgcaggaacattccagagagagcaggattggtggaagctgcttatgagaatcatacaggaagaccagtcttgagctgtgcgtgaaaaaagatttgtcagacctgttttgcaggacagattttttaagcgtcaccgttttgccgcgttacaggctgaataagtaaaacattaaggtggaaccgtgtatgtatgcacccttaagtatatctggcagcaggtatatttaaaggtgcttttttagtttatagaagcaactcaataaacaaaggttctggaaaggaaaaacaatggttaattttaaagaagatgaacagttaaacatgctcaatcactcctgtgcccatctgatggctcaggcagtaaagcacctgtatccgcaggcaaaattctgggttggaccggttgtagcagagggattctactacgatatcgatcttggcgatgacgttatccgtgatgaggatatcgcagctatcgaaaaagaaatgaaaaaagttgcaaaatccggcaaaaagatcatccgtcatgagatttccaaagaagaagctatggaaatgttcaaagatgacagctataaactggatctgatctccaatctggaggatggcaatatttcctgttatacacagggtgatttcacagacctctgtcgtggacctcacgtagacaacgtaaaattatgccgccacttcaaactgatcagacattccggcgcttactggaaaggcgacagcaaaaacaaaatgctgcagcgtatctatggtgtatgtttcccgacagcagaagaactggaagcacacctgcagttattagaggaagcaaaagagcgtgaccacagaaagatcggtaaagacatgggtctgttcatggtagacgatctggttggacgtggacttccgatgttccttccgaaaggatatgtcatctggcaggagctggaaaactacatcaaaaacaaagagcgtaaacttggttatcagcacgttatgactccatgtgttggtactgtagatctgtataagacatccggacactgggatcactacaaagacaacatgttcccggctatggaagttgagggagagtctttcgtattaagaccgatgaactgcccgcatcacatgatgatctatgcaaacagaatccattcttacaaagatctgccgatccgtatcggtgagatcgcacatgacttccgttttgaagcaagcggtactttaaaaggtatcgagcgtggacgtcacttctgccagaatgacgcacatctgtttgtaactccggagcagatcaaagacgagttctccaaagtagtagacctgatcttctctacttacaaagatttcggtattacagattacagatgcgtgctgtctctgcgtgatccggaagacaaagagaaatatcatgatgatgatgaaatgtggaacaaagctgaaaacgcacttcgtgaggttatggattcccttggtatcgagtatacagaggaaatcggcgaggctgctttctacggaccgaagcttgatgtaaacgtaaaaccggctgttggtaatgagtatacactttctacctgccagcttgacttctgtctgccggctaaatttgagctgacttatgtagaccgcgacggcgagaaaaagacaccggttgttcttcaccgtgcaatccttggttctctggatcgtttcatggcttacatccttgaggagacaaaaggaaacctgccgacatggttagcaccggttcaggcacgtatcatgccggttaaaacagatgatccggaactgaacgagtacgctcagaaaatctatgatgcactggatgcagcagatgttcgtgttgagctggataacagagcagagaaacttggctaccgtatgagagaaggacaggttcagaaagtaccataccttcttgttatcggtatgaaagagaaagaggacggaaccgttgcataccgtctccatggtcagaaagagacaacggttcttccgttagacgaatttgttacaaaactggcaactgaaatcgaaacaaaagcaagataggatttcgtaagatttccttaccgtaaataataaaaatgagttctgctttctgtatgtaatgtacagataagtggagctcattttttgtatcttactttcaattaattttcgcttctatctacgttgaataatcaaaaatttaccttccccaaatctctatttcttcatttcctctaaaaatagcggaatcagcggattttcattttcctttgaataaatcacatataaaatctcctgaattccatcggtttccaatggaatataagagaggttcagtggcatagatgccttttcaacctccagttcggtcaaaattccaattcccataccagctgccaccatagtctgtatcgttgctgcgtcatcgtttgttctggaaatattctgcatcagatcatttcgcagataacctgccggaaaatcatggggaaattctgatttactacgactgaaattgtggatgatcaaccgttcgtattttaagtcttcctgtgtgatcatttcacgatgactcaatggatgttccggtggaatgactgcaaaaaacggatattctccaatttttgtgatttctgtcgtatccggataggagagcagtggactttccacattaaaaataatatcatattcccccattagaaactcatcatgcaatgccaccgcattgtcccttttcagatcaatgccaacacccggatatttgaaataaaaattttgtacatttcttggaaaacttcccatctccatacatttgatatacccgatccgcaacgttcctttttgaccacgctgtaccgaatgtacccgctcaatagaatcgctgacttttgccagaatctgttccgcttcccgcataaatacctgtccggaatccgtcagtgagatacgattatttttccgtacaaacagatccagcttcagttctttttccagactacggatctgctgcgtgatggcagactgtgaaacaaaaaacatctctgcggtcttggaaaaattcagattatgtgccgcagatacaaagtattctaattgttgtaacgtcatggttcccctccatttttcttatgctttccagaaaatagtatcaatttttcccgagataatacaatttcaaatgcctgatacagcgtctttccataagttatacttatactatcatctttctttcctgtttgcaacaatccacgcctgcctttataattttaagtatcagataacaagtacgttacgtttttttgtacgaagaaggaggattttattatgggagaaatcacgtatcagccgctgcgcagtctgatctatgtagactgtgtcaaagaagagtaccgtcacaaattgcagcactggctttattattatcatgcaccggaaagcattgcaaaatttgagccttgggtaacaaaatatgcgttttacaatgcacttccgaccccaccgcagggagagcgttttggtacataccgtatgcagctcaccgagcattactggatggtaaatccgatgagtcaggaaagcctggttaattcactgaacgaatatttcccgatcgatgccatgatctggcagggaacccttccagaaaatgcaaaagaggacggatttatggcagatggtgaagctgcccgtgcttccggtggtgataatggatgcccgccatttatttttgcctttttaccgattttctgggagcaagatctcaaaggtgccggtcgtactatggtggatggtccgaattaccgctggcagtttttggtttcctatccggaaggacacaaagaagatggtgatcagtggatgatgaacgaagtattacctgcatttgcggcaatgccggaagttacccgcatgatgacaagcaaagtcaaaaaagagatcaacaactgtcatatggatcgttgtgtggagatgtggtttgacggtccggaagagtggtatcactgtgccgttgaaaatgctgcatctttcaaaaaaccggaatgggctgagtatgataacttcccttatctgcgcccacaattccagtttgcaagcctgtttttgaccgatatcgcaaccagcgacaatttgaaacaatacagaggctatctgccgatgcgctaagttactttggttgtaaaacatttttacaatagatgatacaggaacgcagatcctttacgccattcttttactcatacgcaagttttttggatctgcgaaactgtatagcatagtttaggacatattaggacaattttttttaaggagaaaaataacatgaagattttaggtatttcaggtggtactaaaaatggtgccaacgattgtatgtgcaaagaagcgttacttgcagcaaaagagcagggcgctgagattgaatttgtacgtttgatggatcttgagatcaaacactgtaccggctgtaaagcatgtgttatgagcctgttttccggcagaggaaacatgtgtgtattaaaagatgacttccagtggttattggataaaatgctggatgcagacggaatcatcttttctattccgatctttgaaaaatgtgcagcaggtattttccatactattatggaccgttttggaccgcgtatgggcttatccaacaacattgttgcggacaagatctcagcagcaaacggcggcagacggatcgatccaaaatatatgaaaacaagagctgtttcctacatgggaatcggtggttctgactgggcaacacagattcagaatgatttctatctgcatgcgttgactccgatgtggaaagtcatcgataacgaagtatttatgtggtctcttggtattttaactgatgattccaaagtagcccgtgcccatcagattggtgtaaaccttgcagaagctgcaaaagatatcgaacatgcaacctggaaaggtgaggacggtgtctgtccacattgccattccagaaacttctacattgagggagataacgtggcagtctgcggtcagtgcggtatccgcggtaaattagtgacagaggatggcaaggttcgctttacctttgaggaatcccagattgagcatgcgcatgatactttaagcggtcagtttattcatgcagatgatattcagaataatgagaaaaatgcaggtgctgctgcaagaagtgatgagtataaagcaaaagttcagcgttatgcagaggctatcacagcagttaaaccggaataggaactatgcattacctgttaaatcaataaaaatatatgatttgataagcataaatcaaaaatataaatcaaagatatgtaaaaaaatgtaacgtgaaaagtccaatatgttgttttaacaacatacagggcttttctttttggttataatgtgatcagtatttcgataagagagttttttacaaaatagttcatatatatcatgtatataatgtagtgattctgaagaaaatatgctggtttgtgccaaccaaagtcacatacgttcatggttgaattattaatcactgattttatccaaaacatacgaaaaacatatttacagcaaaggagattttttattatggaacagaaaatgttttgttaccagtgtgaacagactgccggatgcagcggttgtacaggcgcagcaggtgtctgtggaaaagatgcagcagtcgctgccttacaggatgaactgaccggcgctctgatcggtctggcaaaagcctgtggaaataacccgaaaacagaaaacaccgaccgcatcatcatcgaaggattatttacaactgtcacaaatgtgaattttaacacagaaacattaactgctatgattcaggcagtaaatgaagaaaaggcaacagttgtaccaaactgcagcagctgcatgtctccatgtggaaatacctccaactatgatatgcaaaatctctggaacgagccggacgaagatatccgttccctgaaatccttgattttatttggcatccgcggtatggcagcttacgcttatcacgcaatggttcttggctatacagacgaaaccgtcaacaacttcttctacaaggcgctgtcctttatcagctacgatctggaaatggcgcatctgcttccggttgttctggaagtgggagaggtgaacttaaaatgtatggcattgctggatcaggcaaataccactacttatggtacaccggtgccgaccaaagtaccgcttaccattgaaaaaggtccatttatcgttgtcacaggacatgacctcaaggatctggagcttcttctggaacagacgaaagacaaaggcatcaacatttatacgcatggagaaatgcttccagcacacgcttatccggaattaaaaaaatatccgcatctgaaaggaaattttggcactgcatggcagaatcagcaaaaagagtttgatcatattccgggagcggttttatttaccaccaactgcctgatgccagtgaaatcaagttatgccgatcgcgtatttaccacagagatcgtatcttatccggaaatggttcatatcgatgaaaagaaagattttacaccagtgatcgaaaaggctctggaactgggcggatatgacacagatcaggaaaaaacaggcatcaacggcggtcattttgttatgaccggattcggacatggaaccgtattaggtgtggcagatactatcattgatgccataaaatccggtgcaatcagccactttttcttagttggcggatgcgatggtgcaagagctggaagaaattattatacagagtttgtaaaacagacaccggcagattccatcattttgacgctagcctgtggaaaatatcgctttaacgattttgaccttggtgaaatcggcggattgccacgaattatggacatgggacagtgtaatgatgcgtacagtgccattcaagttgcggttgcactggcagaatcattccagtgtgaggtaaatgaacttccgttgtctatggtgctttcctggtatgagcaaaaagcggtatgtattttacttactttattgcatcttggaatcaagaacatttatcttggaccaacacttccggcatttatttcaccgaatgtgctgaattatctggtagagaattataatattgcgccgatcagtacaccggaagaggatttgaaaaagattttaggataaaacattttaattcatatcgtaagtagtcggataaatttaattattcgactacttatttttctatataatattcttatatccataaacccaagcttggagcaaaagccaaaatacaaaaaagaacaggagagtagatataccgc

SEQ ID NO: 13369 - DNA, 1735 bp, Unknown
  gut microbiota DNA sequence
gcatttttgaggaaaatacagacgaatggagaaatttttatgatagataacgattacagagaagtagatacagacgaaaaagacgaggctgtatctgagaaaaacgagacaaccgagactccggtagagaccggtgaggtagtgacagacgatcacgcagaggagcatgaaaaatccgatgattttgacgagttctgtgcaatgtgcagacgtccggcaagcaaagctggcaaactgatccatgtggctccgaatatggcaatctgtcaggattgtatgcagaagacctttgataccatgggacagatgccgggaatcccgggactgggtgacattaatatcggagatatgctttccagcggaaagatgccgaacattcagtttgtaaatatgtctgacctgccgtttggcaatcagcagaaagtaaagaagaaaaaaacgaaagagaaaaagaaagaagagccggttttagatatccgtaaaattcctgcaccacacaagattaaagcaagtctggatgattatgtagttggtcaggattatgcgaaaaaagtgatgtcagtagctgtttacaatcattacaaacgtgtggcagcaggtgctgaagcaaatgcagatggtgtcgagattgaaaaatccaacatgctgatggttggaccgaccggttgcggtaagacttatctggtaaaaacactggcaaaacttctggatgtgccgcttgctatcgcagatgcaacttccctgacagaagctggttacataggcgatgatattgaaagtgtactgtccaaactactgacagcagcagataacgacgtggaaaaagcagagcgcggcatcgtgtttatcgacgaaattgacaaacttgccaagaagaaaaatgcgacacagcgtgatgtcagcggtgaatccgtacagcagggaatgttgaaactgttagaaggcgcggaagtagaagtgccgatcggagcaaccagtaaaaatgccatggttccgatgacaaccattgatacctcaaatattttatttatctgcggtggtgcgttcccgggactggaggacatcatcaaagagcgtttgaatgaacatgcgtccatcggttttcaggcagatctgaaggataaatatgataaagaagaaaatctgcttcgtcaggtgaccacagaggatatccgtaaatttggtatgatcccggagtttatcggacgtctgccgattctgttttcactggatgcattgtctgaggatatgctggtacagattctgaaagagccgaaaaacgcgatcattaagcagtatcagaaattgctggctatggatgaagtaaaactggagtttgacgatggtgcattacgtgccattgcaaaatgtgccaaagagaaaaacgtgggagctcgtgcactgcgttccatcattgaggaatttatgctggatatcatgtatgagattccgaaagatgacaatataggtgctgttaccattacagaggcatatattgaaaagacaggcggtccactgattcagatgcgtggaacaccggagctggaagataaatctggaacaaactaggaaattaaggtaatgatacataataatcttgattaactgagtgttaagagaggaatgcttcttgaatttgacacaagaaagttcttatttgtatatttcatctcagtctgagttgagactcccacttctgcaagtggtgagtagtaacaagtatttctcagtggga

SEQ ID NO: 13370 - DNA, 12424 bp, Unknown
  gut microbiota DNA sequence
ggaagcggtacaatgtgcgcgccaagaagtccgttttctgttcccgggctcatggcactgtattttgctttcagtaatacttctccttttcccggtgccggaatctccttctcctttaagactactttccccggctgagcctctgcatagatggttttcatattgttaattcccctcctgttttttgcgggttacttttatgcccggaacttcttttcctgcataaaaaaacgccgcatatgaaatttattatctcgatgggataattatttcatatgcaacgttctatctcaatgtcgttttctgtgaaaaaacggacgttttttgtgatgttatgtaacctcaccattctaaattgcagatttgatgacattactacaacatatttttctttcttaagatcagcaggatcagaatacaaatgatcaatgtaccaagacagatgattccaaatccgtaaggtgtattggataatggcatccattttccactgacgttcattccgtataatccggaaatgatggtcggaatcgccatgaccagtgtgatggatgtcaggtatttcatgacgttgttcagtcggttgttaataactgaggataccagttcgcgggtaccattaatgatatctcggtagatcattgtcatctcaatcgcctgcttgttctcaataatgacgtcatccaacagctccgtatcttccggatactgctccagtcgtttgtatctggacagacgctccaacacaacaccgtttgctcttaaggatgtggcaaagtataccagcgtagattccagttcatgtaaatttacaaggtcttcatcttcagtatttccgccgatattttcctcgatgtcggttctctttttatcaatgatacgcagtgtactctgatacattgccgctgtgcggaacagaatctgatatacaaaacgcattttcttctttgtggaaaattcacggactctgcgctcaatgaaatgctgcaggatcggagtctcctcggtacatacggtaatgatacattcctgtgtcagaaggataccaagcgggatagttgtatagtttttggattcatgacggatctctgttgccggaatatccaccaggatcagggtatatccatcctccagctcaatacgggaactttcttcctcatccagtgcggcacggacgtctgccatatcgatatcatattgttccgcgacttcctgactctcctccattgttgggtttgtcatcatgatccagactcccggatccatctcttctacttcatgaaggacacggttgtccgtcttgtacacggtcatcatatgtgccacacctgcctttctgatatattcaagatttgtctgcaaatcttgctgcgaactgaacatctgcaaagctgatattttccgctgttcagttctgcaatccttacggagtattcttttgctttgaagaagtaaaagaatgccttaaaacttagtataccaagtttcaaggcattttggtagtgttgaaattaacttttaccggtctttttcatattcttttccttttttataaggaaacacacacatttttacttctttttcccttactgctccggtacacccatcgcaattttctccggtgtgatcggaagttcacgcacccagacaccggttgcgtttgcgactgcatgtgcaagagccggagacggtgtgttgataacaatctctccgatggattttgcaccaaatggaccggactgctcataactgctctcgaactctacgcgaagtttacataaatccacgcgggcaggaatcttatactgcatcagggaattgttcatcattcttccataatccgtatattgtacattctcgtacaatgccatgccgatgccctgtcccagtcctccttctacctgaactctcgcaaggttcgggttcagcggtgttccacagtcaaccacagccacataatcgatcagttccagttcaccggtttctttatcaatttccacttctgccattccaaccataaacggtggcggagaagtcggagaataatgactttctgttacctgaagcgcatgattattggcacacatggaatgtacaccaatctctgctgttgtcacagattttcctgtggaaacacagcttacatgatctccttcaaatctggtatcttccaccccgcactccaatatctgcgccgcggtcgctctgatttcttcgatcagatgtcgggcagttttttccactgctttaccggtaatgtatgcggtactggaagcataagatccggaatcgtaaggagacgtatctgtatccgcaccggatactgcaattttgtccgtatcacattccagacattctgctgccacctgcgccagcgttgtatcgcatccggttcccatatcagcggcaccgatagaaagcagataacttccgtcttcattcaacttaatagtcgcagaacctacgtccacgttagaaataccggatccctgcatggacattgccataccgacgctccgcacttttccattacccatgtcgcggcaagggaatttttcttcccagccgatcatctctgccgcacgtttcagacagcggtctaatgcgcagctgttgtttcgctcaccgtaatacgctggcatgatctcgccttcccgcaccatattcagctcacgcagcttcaccggatccatatgcagtttctgcgccagttcgtttactgctgattccaacgcaaactgtccctgcgtcgcaccatagcctcgatatgctccggcagacattacgtttgtatacacaacatcgtagtcaaaacggaatgcctctgcttttgcataaagcggaatggatttgtgtccgcttaatcctacggttgtcgggccatgttcgccgtaagcaccggtatttgacagtgtatacatgtcaatggcacggatggttccgtccttcatggcacctacttttacgtgtacttccatctcatgacgcggtgaggaagcgatctgggattccactctggtaaaaataattttggacggtttctttgtcatccaggttacaaatgccggataaacctcagaaacagcggtctgtttcgctccgaaaccaccgccgactcggggttttgacacacggatctgggatttcggaataccaagggcattggacacgattcttcgaacatggaatacaatctgtgtggaactgaaaatattcagtctgccgtatgcatcgatggaacaatacgtacggaaggtctccatcatcgcctgctgatccgcaaccgtgtgataggtatgctccacgatggtatcacattctgccatcacaccgtccacatcgccttcttcagatctcgctgtggcacaaagatttcgcttattgtccgctccaaccggacagagagatctccagttatcttccggatgaaccaggatctcgttgtcttttgccacatgaaaatccagaatagccggaaggacttcatattttactttgatcaggcgcatggctttttccacgcaggcttcatcttctccggcaatgatcgccaccggatcacctacaaaacgcacatgctgatccagaatcagacgatcgtaaggagttgcctctggataggtctgtcctgccgtagtaaaacgctgctgcggtacatcttcccaggtataaatcgcttcaattcccggtactttctccgctgctgttttattgatttcttttacgattgcatttgcatgggggctgcgcagtaatttgacgatcagacagtccttcggaaccagatcgtccataaaaaccggttttcctgtcaccagcgccatggcatctttttttcgaattggctgatttactgctttcatctgctacctccattctttttgtattccagaaacgctttgattccacgcatctgtccctcatatccggaacatctgcagaggtttcctgctaaatattctttgatttcttcatcggaaggatccggattttcccggaataaggcaatggcattcatgatcatgcccggattacagaaaccgcactgctcagcaccctgatccgcaataaaggcaccaaattcttccgcttctttctgaagtccctctaacgtatctactttacatccatttacccgtgccaccagcatggagcaggaaagcaccggtttttcatttacaaatacggtacaaagtccacagttggatgtttcacagccacgttttacgctatagcaaccgtgatcacgcacaaagtcgatgagcaacgtgtccggttttacaagtgcatccactttttttccatttaatgtaattgtcacaaccatgttactgcacctcctctgtcacggtcagcagtgcacgacggatcagcgccttagccagatgagtccgatatgcggcactggcgcgcatgttatcctgtgtcggaatctgagccgcaagttcttctgcaatctttgccgctgcatccgcaccgttttttctgatttcttctgtctgctcctcagaaacagtcagaagcattgctttctgcggtcttgcaccgactgccactctggttccttttttatccagacagacggcacatgtcaatactggaaaatctgtttttgtatttctctgagacagatagacgcatttcccaggtatcttttttacgatgagacgaatcaacacatcgttatcacgaggaagatttacaaaatctgccagagacaagattccattgtgatacagttccacatatgcgtccattgccaaaaagcaggtcagcacatcggaaaatccaaaccttccaaacaaactcccacctacggtcgcaagattccgaaactgtacacctacgatatggcgcacactctcacggactgcaccgtcactccactggtttaatccttcgtgtaactccaactgacgcagggatgtcatacatccgatggaaaactgcgtctcatcttcctcaatggtatcaagaccaagaccagacagatcgatggcggtctgtatcctgtgatctcccattttcatccagagcattccaccaatgatctgattggttcgcttctgatttaattcaaatgcctgctccagactttctaccttcacatactctttgatttccagcattcatgttctccttcttttacaatgatttcaaagttttctctcatacaaagcttttcatcccttacttaatgcaaatactatcttcacttttccaaagggacatttttattcttatcgcatctttactatatcattagcatcagatgcgttttttacaaatatcatttaaacagcacttgtcacaatatggctgtgtccgtgcagtacagacttctctgccatgccacaccagacggtggcagaaatcactgccttcctccggtgggatgatcttccacagttccatttctacttttttcggctccttgatgccatccaccagtcccatgcggtttaccagacggatgcagtgcgtatctgtcacaatggccggttcaccaaacacatcacccatgatcagatttgcactttttctgccgacccccggaagtttcaacagtgcattaaaatcctttggcacatttccaccgaactcatcccgaagcattttcatacaggcactgatatctcgcgccttacttttgccaagtccacagggacggacgatctcctcaatgtctgccacctcagcctctgccagtgcttccacgcttggatatttttcaaacagtttcggaacgatctgatttactctggcatccgtacactgcgctgccagacggacactgatcagaagtttccatgcctgatcgtaatccagggtacagtccgcatccggatattctttttttaaacggtctatgatttcaagcgccctttgctttttcgtcataattttcctcgcaatcttttttgcatatctttgtctttataattcaagaatgctccggcattcttgttgcgaggtgcgcgtcatgcaattgcatgacatacttcaactgcgcacctctgtactcctgccggaggctatatcagatgggggattggctcccaccactgatactaacttgtttctcaccacctatagaggtgggagtcatctcccatctgatatagtttctttacttttcaaacttctgaatccgttatccacaattcagtttttctttcttcaaacttccgaatccataatttacagttcagttttcgacatgctcatttgtttttatccgtcaaatagctgtataattctcctgataacaggcaaactatacagctatccccatctttattacagcatatatttttttaatgctgttgtaatttcttcaattctctgctctgcaatctcgcgcacagtcattccttttaagctctcgatgtagccaagctcctgacgatacaaccagtttttctgtgcatcatttaatttctggtaatggtttgcttctacccagtcatcgtatgacaaaggagccggataaccaagtttctcatccagcagttctttcaggtcgatctgatctgcacgctccagcatgccattccaaaattccagaacttcctctacgtgctcgtgaatctcgtaacgacgtgcaccaccatcgtagatgatacatttttcaaataacggattgcacatagacagcgtctggcgtctgaattccggtgcaatgataccgcctttccagtagaagtctacatccggaaggttgataccggatacacctttatcctgataagttgcaaaaacaccttcgtaaaatactgtgataaagccttcaaaatccggccaatactcgcggatttcttccgtcaggcgttctaagatttcaataccttttgtaccaccaatggtaaacacgataatgttgcggagttttgcaccgtgctcacgataaaaatcagttacatagcgtaagcagtggatcagtgtctcgccagttgcaatgatatcaccgatcagcaaggtacttcccggaaccatggtcagcttgctgtatttgatttccagaccagcgatctcatcctcatggaacacacgctcactggacaggaaactgatatcatgcactcggatatgctcacgataacagctctcctccaacggataattcaatgccccacgtaaaatagacagaatgttggcagttgttacctttttctgttctttaaaataatacaacatctgagaagtggacggaatcagacaataatatgtctcatatccgacgatttccggattgtttaataatttccgtgtctccgcttctgatacaatataatattcatttttaaaatctccgtcctccagttgatagcaggataccccctgatctacaaatgttgggacgatctgtacattattccagttcatccttcgtctctcctattttttacatatagatttattatacaatggttcgacaaatcctgccatgaaattttttataaaatctcggctttattcatatacaaaatgcacaacgaagcctcactttgttttttttccaacggtagtctttcgctgtgcattctgttttcctcatggaaaatcctgtttaaatcacttcatttttcactttcaaatgataaaaatttatcttgctaatttacagaaacagttcttagattttatcaataatttttaccggaacagacctgcaattttatcaataattttactggaacagtcctttgatcttgtcaaaaattgtctgtttctgttcaaccgccgtagcttcctctgcttcctttactttgatgtcatcggtacggattgcgaactgtaccagaccgatgtctgtgttttcgtcagaagtgaaggataccggttcataatcgctgccggagagtttttctaccatttcgtcaatggcatcatcaatctgtgtgtcgatgtcagatgtctcatctttgaactcctgtgtaccatcttttaattcagttgcgccatcgttcagttctttcatgccactgctgaactcactggttccggactgaagggtatttgcgccctgctgcagcgcatccacaccggctgctgcactgctgatacctgtctgtaagctgttgattccctgctgttggattgccgcatcttcctgtggcattgtgatcgaaatgtcctgatttgctgccgccgcatctacctttgtatctgcaattgcatttttcagagtagaagcctcatcagaagtcagttttccttcatctcagtctgagttgagactcccacttctgcaagtggtgagtagtaacaagtatttctcagtgggagttcaatctccgactgagataaatgctccgcgagggcgcacattgtctggaagacaatggttttgcgccgaccggaacggagtgtagagtgcagtgattctgataagattcttcagataatgtaagttaaattttttcttgcactcaaaatgtaataaaaaaaccggcagctactacaaaatttcctctatagtagttgtcggcattttactgcatattatttctttccaaaatggaagaaacctttcttttcttttttctcataaggctcagcttcataagataatactttatatccgatatcctttacctgttttttcacccatggaatatcaagttccgcatcactgatgataacggtctctccggcacttgcagaagaagacactttatttactttaaaattgttgcggatgacttcattcatatgagcttcacacatgctgcatgacataccatcaatttttaatacagtctttaccatactgattccttctttctcaaatgatcatttttcaatttacttttcagattcattatgatatttcaagtcgaacacagttgatacccggtgcataattccaggtagcatcagctgacattttcttccattcaatcataaaaagatattctgaaaccagcattattgtatacccctatggggtactctgtcaatcgttttagttagcatatgctactatattattgatgtatttttctcataaaattcaatttttgagatcactgggtaaatgctcttatatattctgtttcaattttccaattaaaaaatgtctgatatacatttatgcattttccaggcaaacatctttaataatatcctgcttttataatttcatcgtccactggctcatattccagatctcatctaccacatcctgataaaactccggctcatgacagatcagcagaatacttccgcggtattcctgcaatgcagtctttaatgcatcctttgcatctacatccaaatggttagtcggctcgtccagaagcaggaaatttgtatcacgattcagcagcttacacagacgtacttttgcctgctcgccaccgcttaatacacgcacctggctttcaatatgttttgtcgtcaatccacattttgccagagcggaacgaacttcatactgagaaaatgatggaaactcctcccagatttcttcgatacagctgtttcgattatctgggcttacttcctgctcaaaatagccaagctgtagtttttcacccaattcgcattcaccggaaatagatggaatcaaaccaagaatactcttcagcaacgttgtttttccgattccgttagtaccaaccaacgcaatcttctgaccacgctccatagagaaatttaatggtttggacagaggttcgtcgtaaccgatcaccagatcatgtgtctcaaacagcatttttcccggtgtctgtccatactgaaaatgaaattccggctttggacgctctgccgccagttcgataacatccattttgtccagttttttctgacgggacatcgccatgtttctagtagaaactctggccttatttcttgctacaaagtcttttaattcactgatttcctgctgctgtctgcgatacgcagcctcaagctgcgcttttttcatagcatacacttcctggaaatgctcataatcccctacatatcggttcagctcctggttttccatatgataaataatatttaccacttcattcaggaatggaatatcatgggaaatcagaataaatgcattttcataatccagcagataacgtttcagccatgcaatatgctcctcatccagatagtttgtcggctcatccagcaataaaatatccggtttttcaagcaataattttgccagtaaaacttttgttctctgaccaccactcaggtctgtgacatcgcggtcaagccccagatccatcaaacctaatgcgcgggcaacctcgtccacttttgcatcaatcatatagaaatcatgctgttccaacagctcctgataagtacctgtctcctcaagcagacgttccatttcctctggtgtcgcatctgccatctgttcaaacatctgattcatctctgtttccatatcaaacagccaggaaaatgcggaacgcagcacatcaccgatggtcattccttcttccagcactgcatgctgatccagatatcccgcccggacattttttgcccattctacttttccttcatccggcatcaaacgtccggttacaatactcataaatgtggattttccctcaccatttgcaccaatcaaaccgatatgctcgcccttcagcaaacgaaaagatacatcttcaaaaatcgcacgatcaccaaaaccatgcgtcaggtgttctacatttaaaatactcatctagctatatgttctccttcattttccaatttcagctgcttttatgtttacaaccagttgtccacttttacccgttttttcatcatctggtacaatttataataattcaaatactcttgccttgtgttaatttctgcacccatgccaagcaaaatccccgcaatgatactcctatgacacattgcttccgtttcgcaatagcagccaagcataatattttttgttttactcatatctgtcaaattttctagcaaagtaagtgcctctgcattctcagataattccttcacaaactgtggcacatacacttcataaaaaaatttctgattaaacgatttttcctgacatgcttcacgatatttctggaacagatctggcgacggactgagcgctggtatatgtttcacaaaatcaggcagatcatctggcttacgcacaatcaaccaattttcttcatatttgttttgatccatttcttgataactcccaactgttaacattacaattctccttctcttatcttaaatattttataaaaacttctatagctattatttatgactcgttcaacacctcgcagctctcttttaatatttctaaacgatctttaattttctaaatttgtgcagtttacgaaacatacttttttcaaactacagccgtcatctataagacatttattgtaccataaattatcgtctaagttaagtcccttctccaataatatatcacctagttaaataattttctctctgcaaatttagaaatggaacaacttggaacaaaagaacaaaacatgacccttgtaacgcaaaaaaataccgcaaacccttgtaaatcaaaggcttgcgatacttcttaggacgtgcgtgagaggattcgaacccccgacaccttggtccgtagccaagtgctctatccagctgagctacacacacatattcaattaacttctttaagaagttaatgccggcgaccggaatcgaaccggtacgatgtcgccaccacaggattttaagtcctgcgcgtctgccagttccgccacgccggcatgatgctttagcatcgatgggacctacagggctcgaacctgtgaccctctgcttgtaaggcagatgctctcccagctgagctaagatcccatataaaacgacccagacgggactcgaacccgtgacctccgccgtgacagggcggcgctctaaccaactgagccactaggccagatcgttaattatatgttttgcaaaatggaccttcggggactcgaacccaggaccgaccggttatgagccggttgctctaaccaactgagctaaaggtccataaaaagccgatgatcggactcgaaccgataacctgctgattacaaatcagctgctctgccaattgagccacatcggcataaacatacagaaacaaatttgtttcctgagtctaatgtttatcagccaacagacctctgctacttttttgagcaattctgctaacatataagtgactccaacgggaatcgaacccgtgttaccgccgtgaaagggcgatgtcttaaccgcttgaccatggagccgtaactccccgagtagggctcgaacctacaacaactcggttaacagccgagtgctctaccattgagctatcgaggaataaggtacatgatatataccttcaaaacttcacacagaaatccgattcatttcaaccttttggtcaagccctcaaacgattagtaac

SEQ ID NO: 13371 - DNA, 294 bp, Unknown
  gut microbiota DNA sequence
ggagagatcacgagaatcaaaaaaggagttcatgcgagctcgtttcttgcctttcttacatctgcgtttatcagtatagtgatgtttctttttggaaagacgctgctttcgatgtttatttccggagatccagagcagacaagtcaggtactggcaatcgcctggcattatctttctattatggcatcctgcctgtgtatcctttattttctgtatgtataccgttctgcattacaggggctcggaaataccatgattccgatgttgagcggagtggtagaattttttgtcaga

SEQ ID NO: 13372 - DNA, 920 bp, Unknown
  gut microbiota DNA sequence
acggccttggcacactcttcattcgttagcaatgtctcatacatcttctctccatgacgaataccgatcactttgatctcttctttctttccaccaaacaattcacaaactgcttctgcctgtgtctgaatcgtacaagccggtgctttctgaattaacagatctccattctcaccatgctcaaacgcaaacaataccagatccacagcttcttccagagacatgataaaacgtgtcatgctcggctctgtcagtgtaattggatttccctgtttaatctgatcaatccaaagcggaataacagatccacgactacacattacattaccataacgggtacagcaaatttttgtctttccagacattctggattttgcaacggctactttctcctcaatcgcttttgtgatacccatcgcattgatcggataagcagctttatcagtagaaagacagattacagactctacaccttcctcaattgctgctgtcaaaacattttctgtaccgataacattcgtacgaactgcttccatcgggaaaaactcacaggacggaacctgttttaatgctgctgcatgaaaaatataatctacacctttcattgcacctctgacagactcaagactccgaacatcaccgatgtaaaatttaattttctctgctacttccggcatttttgcctgaaactcatgacgcatatcatcctgtttcttctcatctctggagaaaatgcggatttctccaatatcggtagaaagaaaccggttcaaaacggcattgccgaaagaaccggttcctcctgtgattaataatgttttgtctttgaataaactcattttcttctctctcctttacaaattgtatttcatgaattcatctattttcgagtacaaaaataagagcccgaaggctcctat

SEQ ID NO: 13373 - DNA, 827 bp, Unknown
  gut microbiota DNA sequence
caaaataataatataaaggatccagaaccattgaaattttgccgttattttgacaggttcgcagcaagcttggtgtgctgcctgagcgaagcgagacaaggaaagcttgcggataagcgacctgtcaaaatgatgtgcataaatttcctggtctggatcctttattattttgtttttctcatatacactccccacgactaccatttcaaactacaaattacaatttacatcttccaattagccgcctccacctgcaattccaccatatgtcgataaatcccatcacaagctttcaattcatccggcgttccgttttcagcagcaaccccgtctttcaacacaacaatcttatcagcgccatccacagttctcattcgatgtgcaataattaatacagtcttatccttgattaattttgataatgcttcctgtatcaatgattcattatctacatccaaagatgccgtcgcttcgtccatcaggatgattggtgcatcttttaagaatgctcgtgctatcgagattctctggcgttctccgccggatagttctgagccgttttctccgatcatggtatcccatttctgtggcattttctcgataaagtcttcacagtttgctaattttgctgctgccataacttcttcgtctgttgcatcttttcttccgattcggatgttttccataatcgtgttgttaaatagtgttacatcctgaaatacaatggaatatagtgataataatgtttctggatcgatcttagagatatccatgcctccgaccgtgatcgttcctttgttgatatcccagaatcttgcagctaatct

SEQ ID NO: 13374 - DNA, 5609 bp, Unknown
  gut microbiota DNA sequence
ggcgtctgcctgaatctcatcatattccatatgtactttttcctgaatttttccgacatcaatagacagactttcatttcctgtcttctgtcgtgcatccatcagtgcatgccaaagccggtctgctgccggtgcctgcaccagacgttttaatttgcctgccacgcccacttccgcataataaaatgccggcaggtatatagctttcatttctgcctgatctgtgttatagtctaccgtttcacagatcaggtctttgtccatgatcatctgatccagagtcattacgatactggattcttccgcttccagtaattctgctgccttcgcgatcagctgcttctgatatgcaaacacatgcccctcatctgccagattactgagtgtatacataataccactgcgcaaccggacataagcctcctttgcaaaaccaagcttctgtgcaattccatctgctgtcttaaatccaatgccccagatatcatctgccatctggaacggattttctttcattttatccagactttcatttccgtactgacggtaaatttttgctgcaaaagaggtactgacgccatgatcctgcaaaaaaagcataacatttttaatctctttctgccgttcccaactatcccggatcatttttatccgcttcttcccaataccatccacttcctgcagccgggaaatatctgtctcaatcacttccagcgtttctatgccaaactgtgctacgatctttttcgcatatttcggaccaacgcctttgatcagaccggaaccaagatatttttcaataccaaatactgtggccggaagagtttcttcccagctctctgccgcaaactgtcttccgtaacgactgtccactttccagttgccgtaaatcagaagaactgaaccaacattgacatccagcaggcttccgataaccgtcaccagttctttgtagcttttcacggcacatttgagcactgtgtagccattttccggattttgataggtaatgcgttctactactccgcggatttttaccgtaaaatgctgtggacgctgctgcacttctacagcttgcgactgtacgttttcgttctgcgtctgattacgattactatgtgcgagattatttaacgaatttactgccatctgatctgcgtttgcacttgtacctgcattcgctgtttctgctgccttttttcttgcttcctccaaacgcttctgatgtgcctcacgcatttccgccaccatgcactcatacactttctggttcatgtaacagtcattcagcgcacgatgcgcaccttccggtgaaatgccgtaatgctctgccagatccaccaaacgatgatgctccatgttcggtaaatgcttccgcgccacctgcaatgtatccacataattattctgcggaatttcaccaaaatactgctccgcatcccgccagataaacttcatgtcaaaccgtgcaatattgtgtcccactaaaacaagtccttccgcaaaatccagaaactctgccaaaacctgagaaaacgccggtgcctccgcaaccatcgcattcgtgattccattgacttttgtcgctccaaatggaatcttccggcccggattcaccagcgtattaaattcatccaccactttgccacctttgactttcagcgctgaaatctcgataacttcatcgtagtttggagaaattccagttgtctcaagatcaaagatgacatagtctggtgtgtatttattgatcagagttcctttctgtgtggacatgagtatcactactttctattcattctttttcgtatcttatcatatcccattttaaagtacaatcatcaatagtttttctcagtctgagttaaaaaatttactcatatctcagcgcatcaataacttccatttttgctgctttcttcgccggataagatccgaagaacacaccgatcagcattgaaaagcatacggagaggataattgctaatacagacggatgtacattcatgataatataacctgcataatcgctgtagtagctgttgatgacaagcatcgccacttttccgagaataaatccaaacaggattccgattagaattccaatgattccaccaacgaggcaaagcaccacagactcaatcagaaactgctgcttgatggccttattttttgcacccaatgcttttcggataccgatttctttggttcgctcggtgatggacaccagcataatattcataacgccgacaccaccaacaatcagagaaatagccgcgataaaggaaatggccacggttactacattaataaccgtattaataacgcccatatccgaagacatattgtatgttgtgacctgccatttttcattttttgcatatttgtctgcaaaaaagctctgtatatctgtttctgcctgattttgatccgcacctgtttttaaaagaacacttatatatgtatatccattggtcgcttcactatgatttaatttatttgcagttgtagcagggatatacatggtagtgctgcggtctttttccggaatcgtcgtatcctgtttaccgaaaatagcagcattatattcatacacacctactactgtaaattcataagaataaccatcacttccactgtaaatgatctgctgtccgataggatcttcactaccgaaataataggatgccatcgtatcggatacaacacatacacgcttctcctttttcatatcctgctttgtcagattacgtccacgaagaatattaattttcatgtactccagttcttcttttgtcgttcctgttgcgtccacgttcgcatatttatcactgtttttgtaaatctgaccgctgccaagataagctgaaataccaaaacctgcgatctcgtccgggtatgtttcctgtaattcatccagcatatcctgcgtaatataatcatctgctgtcatcttcggatattcccagtttgaccagtccgcatcatcctccggataaatagcatccacactggcgctgatactgtttccaccaagggagtttaatgtagcattcaacgttgatttgatggatgttccgatggtggttatcgtgataactgcagaaataccgatgatgattccaagcatggtcagcagggaacgcattttattggaaagaaggttctgaaaggcttctttgatattctctatcagcatatcattccctcctctccgatttctggcttattgcatccatcattcatcttgtgatgacctgacaaatcacagcctttttctgtttttttgctgtcggatacgatcataccatcatttaatgtgacaattcgctcggtctctgctgccagttcctttgaatgagtgatcagtacgactgtttttccctgttcttcatggagtttgtgaaaaatatccatgatcatatgaccggtctgggaatccagtgcaccggtcggctcatctgcaaggataatggaaggatcattgatcatcgccctggcaatagcaattcgctgtttctgtccaccggacagctcattcggacggtgtgtggcacgatctgccattcccaccagttccagcatctgcataccgatttcctttgcatttttcggacgatgctcactgtacatcaaaggcagggttacattttttaaggcattagctctgggaatcagattaaaattctgaaatacaaaccctatttttttattccgcatgacacttcgcacggtatcatccatgctattgacatcctctccttccagaaaataattaccggaagtctgacgatccagaatccccataatattcatcagcgtactttttccagaaccggattctcctacgatggaaacaaactcgccacgttttacgtccagattgataccatgaagaatttccagttcgtttggctgaccgatataatatgtttttatgatctgttccatgcggatcataatttcatttgacatgtataaaaacctccatgattaatccgcagttacttcagaacttacacttgtagaaccgtcacctgtattttcatttccactctcatcactgccaatttctccagtaaaggtatctccttcggaaatagagtaatccatgatgacatagtcgcctgctttcagatctccaccggtcacttcggtataatagttaatctcatcgcctactgtgacatttttctttacagctgtataagttccgtcaccgttatcttcggcacaaagtacataatctttgttattttcatcctgctgcaccagatcatatggaacagccaacacattttgacggtctgtcaggacaacttttgccttggcactcatgccactgatcagatcacaatgatccagtttgatctgtacggaaaagccacctgtattggaagcaccggaagtctcctgtccggtctgctcggtagttggctgagatgcattgtatacttttactactttaatgatctcaccattgatttcctgatcatccagtgcatcggaagtaacgatggctttcataccctcctgcaatttcagaatatccttctctgtgacgctggcatttacgatcatatcggtattattttcaaccgtaaccaaagtactgtttgctgtatttacatcaccaacagaaatattgactgcagtaacgataccttcactcttgcttgtgatggtgcagtcttccagctgttttttcagctgatccaactgtgtctgtgtatcactgtcatccgtctggttgtattttgcagaatcaatactgttctgagcagaataaatagcatcatccgtagatgatttcacacttgtatagttattttttgcttcttttcgggcactgtctgcggaagtcagatcactttttgcactggaaagctgatcctgaaggtcggaaagttttgactgaagatctgcttttgcgtcctcatcggatgctgcatttatctgatcggatacggttttgatctgattatttaatgaatttaccgtattctgtgctgcggtatatgcagcctctgcactgttgatgctgtcgtttgcctgcgcaagctgtgttttctggtcttctttcgcacgctctaaagtacgctgattctgactgttttcattctgctttaaggctgctgcgttagataatgatttctccagtacatcaatctgtttctgaatggaatctttgtccaaagttgcgatcacatcacccacttttactacatcaccgacctgtacattgactgatttgatttctgtcgctgcggtagatgaatagttgatcttggtttcgccgcttacggttcctgtcagagatataaaatcggacagatcccgtttatctactttttccagttgtacaatgttggttgcctctgctacgctgtttaattttcgtttggctacaccaaccagcacaatgattgctactacaatgatggccagtacgatcaccagttttttgtgtttgaatttctttttcaccgtcagtcctcctgtgttttgcttttggtgccgaatcagattatgtaaatttttattctgatttgagatataaatatattagaaaataaaactgtgaaaaaaatgtatgaaattcttaattt

SEQ ID NO: 13375 - DNA, 426 bp, Unknown
  gut microbiota DNA sequence
gccgctacttacggaatcgagttttctttcttttcctccgggtacttagatgtttcagttccccgggttcccctccatacgttatggattggcgtatggatacatgaggtttgctcatgtgggtttccccattcagagatctccggatcaatggatatttgctcctccccgaagcttatcgcagcttatcacgtctttcttcggcccttagtgccaaggcatccgccctgtgccctttctgcttgaccatttgctcctgataccctagcgtaggtatcagcggtctttgattctcgttgcttttgataattattattatcgatgtcttcctatcttacgtttgtatatcaaggatatttgattagttaatcaaatttacatgtatgcagttttcaaggtacgatactgggcttaattttacttaag

SEQ ID NO: 13376 - DNA, 1406 bp, Unknown
  gut microbiota DNA sequence
attgtagaaaagcgtcagtaagaaatgtcagaggcgatttttttcctcatttatgattgataggaaaaaatatatatcagggattgttttcgaacagttatatgatatggcatgaaaaagagaacaggggacaggagaaaggtatgcttcagaatttgtttcgggaacaattagaagattgtccggtgatcgcagcggcaagagatctggaaggactggcacactgctgtcagtccgagagtggcattgtttttattttatttggggatgtctgcaccatttcgaaaattatagatcaggtaaaatctgcaggaaaactggcatttgtgcatatggatctggtgaacggactatccagtcgggagatcagtgtggattttatcaggaaagaaacgagggcggatggaatcatttccaccaagcagccgcagatccgccgggcaaaagaacttggcttatatactgtgcaccgtttttttgtcattgattccgctgcttatgaaaatgtggaaaaatgcacaaaagcactacgcccggattgtgtagaactgatgccgggagtgatgccgaaagttattcggcagatgacagggaagctgtctgttccggtgatcgcgggtggtctgatttccgataaagaggacattattgctgcgttggatgcaggagcgacagcgatttcaacgacgaaagaagaactgtggtttttgtagcagatagatgagaaaaattgggggatgaaaaagcatgaaagaaatttggcagggattttttcaaaagaaacattttggcatacggttcgttacagtaatgctggcagttcttggtatgggattttccctttcctttttgttactggtagatctgggagcagatccatgtacgatgatgaaccgcgccatttcgatgaaattagggatgacttttggaaactggcaggcattgctgaatgtgatactgttggtaatcgttgtgatattcggtgggaaaaatcttggttttgggacacttgcaaatatgatcttaatcggatattatgcagatttttttatgtggatctggaatcaggtatttccggaaaacttatttcagagtatgcaggttcggattggagtactcattccggcgattattgtatttattctttcggcagcactttatatggacgtagatatgggaacggcaccttatgatgcgattccaattattatatccgaccatttgccgaaagtcccgtttaaagtagttcgtatgtgctttgactgtattgtgacaatactgggacttgtctttggtggaaaacttggaattatgactgtgatcatggtgctgacacttggaccggtcattcagtggatgggcaatattttgaaaaagtattttccggtgctgacaggagaagcgtg

SEQ ID NO: 13377 - DNA, 860 bp, Unknown
  gut microbiota DNA sequence
gccagacaggtgttggagcaggcggcgattctggaagacaagtacaaaactggaagcggaggaaaaaagcagttttgtgtgtccacgcagcattattcctttgcggtcaatgcgtttgtcgatctgatccagcaatacggtcaggaagagtatgattttagtttacgtgaaacgcagacttacgagatcattgaagatgtggcaaaaatgaaaagcgagatcggcattctgtttttgaacgaatttaatgagaaagtactccgaaaactgatgaaagccaatgatctggaatttcacccactgtttacggcgagaccgcatgtgtttatcagcaggagacatccgctagcagatcatacgatcattacgaacgaagaactggaagcgtatccgtatctttcctttgagcagggagaacacaattctttttatttttcggaagaaattttttccacgacggagcggaagaaaaacattcgtgtccgtgaccgggcgacgctttttaatttgctgatcggattgaacggatataccgtctgcagtggtgtgatcgaccggaatctgaatggagaagatattattgcggttccgcttcaggatgaaagtgagatgcagattggatatttgacgcatcgaaggggaatgcgcagcagacttggagaaacctacttagcgtttttaaaggaatatctgaaagattgaaagaagtttctgcatagtaaatggtacatgggataacattaatgttcttttttcaaatttgataaaaatctgtgtcagcttcctgcaatatatcagatgggagatgactcccacctctataggtggtgagaaacaagctagtatcagtggtgggagcc

SEQ ID NO: 13378 - DNA, 200 bp, Unknown
  gut microbiota DNA sequence
tactatggcatacagattaaaagactatctttataacgataaactcacaaaggaacagaacatactcatggatcggctgtataaacttcgcatgtccggtatggctgaagcatttgaaaagcagcttttggaaccaaacacaggtctcgaaccatttgaagtccgctttgctgctattgtaaatcaggagtgggatcagc

SEQ ID NO: 13379 - DNA, 430 bp, Unknown
  gut microbiota DNA sequence
gacgccactgaaaaagttcttattttgcgcaaataagacaaaatgccctgtagattgttctattctatagggcattttagtgataaaatcagagcaggagaaaggagtcggggttatggaatatttgaaaatgctggttgaggaatttcattcaacgacagtggcaacattgggtgaagatggacatccgcagacgcgtgtcatcgacatgatgcattatgaggatgatggtgtttattttttaaccgctcgcggaaaagcattttatcaacagctgatggaacaaaagtatattgcggtgtctgcaacaaaggataaaaaagcaatctcattgcgtggtaaagtgaaaaatatcgattcggaaaaattagatattttatttgaaaagaatccatatatgaaacagatttatctcagtctgagttgagac

SEQ ID NO: 13380 - DNA, 2219 bp, Unknown
  gut microbiota DNA sequence
cgggagaaacaagattttagatagtgtcaaatgaactatgagaaacaggatcaatgaactttgaaaattgtagtgtggtagtattttataacgaatgtgaagtatgaaagaggtgaatcagggtgagaacatttatgagtggtgtcccggcgcgggattatatttttcaaacagaaccatatgaggagcagatcaaaaaagcagcaaagctgatccgggaagcagattatattttatttggacttggtgctggaatatccacggcggcaggtgcgcagtatggtggcgattttttcaaaggaaattttggtgaatttattgaaaaatatggtgcaggaccttacatgcaggacatgtacagtgccggtttttatccttatccggatgaggaatcttactggggatactggtcacgacaggcgatggttggcggtattgagttggatgtgacaggattgtatcggcagctgatcgcactggcacaggggaaaaaatcgttttgcctgagtacaaatgcggatggccagatggaaaaagcaggctacccgacggaacagattttctgtacacagggcgattattttcatattcagtgtgcaaaaggatgccatgccaaaacgtatgatgcggttgcgcgttttcggcagatggatcaggcaaggcgggattgcaaagtgccgttttatatggttccgaagtgtccggtgtgtggcggaaaaatgaatatgaatctgcggatcgatcagtattttgtggaagacgaagcgtggtatgatgcagatgaacggtttcagaaatttttgagagaggctttgaaatctggtaaaaatttctgcctgattgactgtggaacgggatttaatacaccgatgatcatacgttttccgtttgaaaaaatggtgcgtgaacatggtcaatgtgctatggtgagattgaatctgaatgaagcggttgtgcaggaaagctgtgaggagcgggaagttggaatcaatgcagatatggcaaaaagtattccggatattttggaaactatgaatctgtaaagatatatagaagaagtttgctatgtgttttatgatgtgtatttcacagttagaatgtaaagttattcttgaaatacaatgaaagtgtcatatggtcatacaaatatagaaaagaatgatgtgaaagcagcagagttttttcaggagcagaaaggagcaggcatatggaacagagaaataaattgcagtcggaacggttagactttttactggatgctttaaaagaggattctatccagtataaaaatttgcaggtaggtaattcagaaacggaaaaaagaaacgcagtgagatctctgatgaatgtccgtatgccgcggagtatttcggatgattttctggaagttcaggatatatttttacaggaagaagcaaaggaaaaaggaattgtgacgctggcggaaattccaacggtaaaggatgcatatgaaagtcagcggtcatttgcagacagaatgtccatctggcagggagatatcacccgtctgcaggttggtgcaattgtaaatgctgccaattcccagatgattggctgttttgtgccatgtcatcgctgcattgataatgcgattcacagtgcggcaggggtgcaacttcgaaatgagtgtaatcatattatgaatcagcggagaatccggtttggcagacagtatgaggaaccaacgggaacggctacgctgacgtcagcatataatttaccttgtaaatatgtgattcatacagtgggaccgatcgtgtacggaagattgacggaagctttaaaagaagatttgcggaattgttaccgtaatgtactgcaatgctgcatggaacatgaaatcaacagtgtggcattttgctgtatctccacgggagagtttcatttcccaaacgacattgcggcacagattgcggtggaaaccacagagcagttctttgcacagaatgaaaactgcggcattgaacgtgtgatttttaatgtgtttaaagatattgatctggaactatataagaaatatgtttgcatggaaaatttatatagttagcagatatttaggagacctttgtttttagttgtagctatatagattaactttttatattgactaatagtgttagcttttcaaaaagttttatagtaaaaatataaaaactaccagtattagctttctaagaatttttattggaatacataaa

SEQ ID NO: 13381 - DNA, 922 bp, Unknown
  gut microbiota DNA sequence
actatcagtattagtttttgcagaacttctatagaaaagtataaaagctaacaatgttagtcttcccaaaattcttttgaggaaaaaatatccatagcatccatatgcgcactgcatataagtgtcacatgatacttgcgggcaagtgcaacggcgcggtcggtaggagcaccattgctgactaaaaccggtattctggaacggatcactttttccatcatatcgtctggaatacgtccgctggagaaaaggaggcattttgtcaggtcaagtccgtcaatcagtgctttgccgatggctttgtccaaggcattatgacgcccgatgtcttcacacagatagcggacttcgccttcatacatcagaaaacagctgtgaatgccgtgagttttctgatggagtggggcacctttacgaaatgcctgaatcagatcaagagcctggcggtagtcaaaatcaaagtcaggaagaacagagacgggttcagcgtcatcctgttcggaaagcaggtcgcgtccaagcataccttcttcgccgcagtcacaggcgcggacttcaattggctttttgatttccccgagtggtcgggtggtcattactctggcgcggacaccatcacggcagatgtaaatactgtgaatgtcttcgacaccgttaatccgaccttcggtgtacagatgaccaagtaccagtgccggcagatcttgaatggtacagaccagtttcagcgccagatcttcattaatataaacagataacagattttcatgaagaatgattttttcttttttttcaaatgtgttgctttccgggcggtagcagatcatatcctgtgtttccaccgccggctgagcggtgcataaatcttgtatttccataatgatattctttttaatccccttattaaattcaatttgtgttt

SEQ ID NO: 13382 - DNA, 10135 bp, Unknown
  gut microbiota DNA sequence
tttacacagaattaattacagtctccaagaattccgatgccgcttttcataacctaccgttagagttatattcactacctttcgaaaattaataatttcccgtaagagccacattcataatctttcgtaagtcaataaccataatctctcgtaagagtcacatatcaatcattcggtttataatagaagtgtccaaacaatctctccgttttcaacacattaataaacgcattcggatccgcttctttgacagcctttcgcacttttttactctccgcactggaaaccacagaatacacaacctgtcgttccgtatgctcataaggtccttctccatccagaatcgtagccccatgattcgttgcttttgaaatcgcctgataaacctgttccccttgattggtaacaatgaaaaacgtctcctgctgatattttttatacagcgcatgcagcacctgggtagatgcaaactggaaaataatggagtaaagagccttgtcccatccaaacataaatccggcagcaaccagaatcactgcattcaatccgagaatgatattaaaggcatccattccttttttctctgacagataaatggaaatgaaatcagtgccgcccgtagtggaacccatcagcagacagagactgatggcaaatccgttaataataccgccgaaaatactgatcaacagcacatcagaagtaatggcaatacccggaatcacgtcggtaagtacactggtcagcacaatacacagacaggaatacagcgtaaattttttaccgataaaacggaaaccaatatagattggaatcgcattcaaaattacgttgatcacggtataaggcagcgccagcccaaggtacatctgcgcaccacgctggatcagcagggaaagtccggtagctccgcccggatacagaccgccggtgcggacaaaggacttgatatttaaagccatcagcacagaggcgaggcacacgacaatcagtcgtttgaagtctttttttggttcaaatttcaaaataaattcctccttacgtagctaggcattggttccggtcgtttacaggtagaagttacctgtacaaaagcacctttttcgctgctttccaccatatgatcaatcacatccagcacatgcacggcaagttctgcatttgcacgattttcgcgtttttcaaaaatcgcatctgccatttcagaaggaccaagcccacgactgttttcaccataggaaaagccatagttcagaatctgtggagtcggatgatcttcaaaatccttttgtgcaggcagatagattacattcccaccaaaggtattgggatcggtcagtttcagtattccctttttcccataaatcataaaatgtgcctgatcctgaatggtactgtcaccgttgatggatagcgttccggcaattccgttttccagttttaaaatagagaagacctgactttcgtttggataggaaatcggtttcccataagtgggactatctggaaatgtgttgattctttccggtgcaagatttcgaacgattgcagacactgaatccaccggaccgagtaaactgatcaatgctgtcagatgatatacactgtagtcataacagataccaccgcccggcatacacagaaactgtgacaacccggcaagataatccagatcccggtttgcgcagatatcaaaagaagtcacttctccgatcagaccgttatcaattgcttttttggcagtctgtaaagctgcccccagaaaagtatccggtgcggagccgagaaaaagattttgggcaagagccagttccagcaatgcattggcagtttttgcagataaagtcatggtcttttccgtatacacatgttttccgacttccagagcctgacgaatcagaacttcatgagttggtgcgggggtcagaatgacaaccatatcaatggatggatctgccagaatttcttcgtaagtacaagccagaatgccatatttttcggctttttcttttgcatgttccagatggtttgcgcagcaggcaatgacattcaaattgtcaaagcggtaaatcatattttccagataaatatcactgatcgcgccgcagccgacaacggcgacgttcattatttttcgtcctgtattcatattgaaaacctcctaggtaaaaaacgtgtatattgcaattaatatccaaataataatcgaatgtagcatatgtttaaaaatgttctgggtgttcttgcatatattcccgaaaaacttccagaaacagtggcaccgccggattggttattttgtgcttccaggcaatggccagattaagtgtatcattgcttccatctagtaaagtgaatgccagattgtttgcatgcatataactgcggctgcgataaggcaggattgagatgcctgtgccggcttctattgcctgaagcagattttcgtacaagtcaaattgttccgtgatgcggggatgaaatccaatctgtgcacacagttccatgatgcgctggttcatgtatctggcatgttccggatggaaaaccagaaaaggttcgctggccagtttgtcataatccagaatcattttctgaagcgccggatgatctttccgagtaaccagacagaaggaatccgactggatttttttgacatccagcgaggcaatttgctgcaaatccggcatcatagaaaaataaatatctgcatcctgccgagcggcggattctgaaatctgtaaagcgtcctgtcgtatcagcttgatctttacatgcggatagcgaatgtggaattgatttacggcatctggtaaaaactgatgtgtcggcgcggacagatggctgatgcgtagtacggaaggttgttcttttgccagagtcactttttgctttgcatgttccatagcatccagaatgatttttgcatcttcgagaaagagttcgccgctatctgttaaggtcacttttctagtgtttcggacaaaaagctccgtatccagttccttttccaacatttttatctggtggctgatggcgggttgtgtcagataaaaatcctgagccgcccgggaaaagttacggtatttggctacggcaatgaaataagacagttgtttctgatccataagtacctccggtttgatggtgtaattactaaaaatgcaagtttgttatttcttacatatgaaaacatgagagccacatttgttatcagttataaaaaaaaattatcaataatacaaaaatatatgaatttcacaaataaaaatcttcatgttacaatcaatgtaacacaaaagaggttaggtgtaaacgaaaatcatgcaggaaaaatgtcaggcatttccctaccaaagtgcctgattttcgtacaaaaacagaggaggtaaagttggtatggcgtttcaggttatgggagttactgcaggaagaaaaaacagtaattcagaaattttattaaaagaagcactgcttgtctgtcaggagatgggggcagaggtcagaatgatcaatttaaaggattacaacatcattgactgtaacggatgtacatcctgcacaatgggtatgtccatgggaaaatataccggatgttccctggataatgcggatgacaaaaagaagattatggatgtgatgttgaaccaggatgcagttattttttccgcaccgacatatgatctcatgccgtcatctttatttttgaaatttatgcacagaaatctggcatacgaatcagcatttttaacaaaaatcggagcaattgagccgagagatcgtgtgggggcgctgatcgcagtgggcggttctacccgttcctggcagtctatggcgctggagtgcatgcaggcaactacatttacaaacagttttaagatcgtggatatgtatatggccacgcaggttccagctcctggacaggttctgttatatgatgaaaaaattgcccgggcaagagagattggcaagaatgtcatggaagcgctgaacacaaaaccggaagaacggaaatggctgggagatccggattatggatggtgcccgaactgtcacagcaattcactgtgtctgggtgagccgcagtggaaaggtctgcagtatccgattgagtgtactgtatgtggcgcaggcggtgatctggagcgtactccggacggaaaatggaaatttgtcattgcggcaaacggactggagcgtgatcgcactacggaggaaggccgcggtgttcattgcgatgaaattgcagagacacagggaggatttttcatggatccgaagaaacgcgaagaagttgctgcaaaattaccaaaatacaaagaactgaaattcccggagttagactaattcgcggattcagatattctgtaaaaggatccatttatgtatgaaatcctgtttttggcaggtatgacaaagctatatcaaatcggatataaaatatattcggttacaacataaaatttactcaggttaggagaagaaaaaaatggcatttacacatttattaagcccgatgaaagtcggcaacaaagtttacaaaaaccgtatcgtaagtgcgccgatggcattcgcacttgtggcacagaacccgatggcagcagaggtttcctatcgaaaactggaaggacctgcaaaaggcggaaatgcctgcgttattcttggtgagacagatgtcaacttccgtgacgcagtacgtatcccgggattcaaaccatttgattttgcaaaaccggaagaagatatggagacattcaatgcggtaaaaacatatgcagaccgtatcaaaaagcatgactgtatcgcactggctgagctggttcactgcggaaaagaaaaagttccgttcagcgatcagcaggaagcaatcggaccggtggcctgtacaaactctgccggagttccggttcgtgcaatgacaaaagacgatatggatcgtatcgcaaatgattttgcggtagcagctacttatatgcagaaagcaggatttgacggaattctgattcatggcggacatggatttatttttacacagtacctttccccattgatgaatacccgtactgatgagtatggcggatctctggagaaccgtgcaaaattcccgattcagatctgcaaatccattcgtgaagcagttggacctgatttcctgatcgagcttcgtattgatggaacggatcatcagccgggtggaatcacaccggaggagactggaagattcattcagatggtagagcagtatattacatccgtacatgttacctgtggtatttatgaggaatccgtaaaatccggtacagagtccagtatgttccatgagcacggactgaacattgaaccggcttccattattaaaaaatatacttctctgccggttggagctgttggcggtatcaactctccggagcaggtagatcaggcaatcgcagatggcaagatcgactttgcaattttcggacgtcagatgctggcagatccggattttacacagaaatgtatggatggcgacgaggcacagatccgccgttgcttaagatgttataaatgtttcccgggatctccggaggaaggttatgatgatcttccgtttaccagtgagcagcttgcagtttacgtaggacattgtaccatcaatccaaccgctcatttaccgtttgatgttgagcagcttccgccagctgagaaaggtccgcagaaagtgctgatcgtaggtggtggtattgcaggtattcaggcagcaatcacagcagcagaccgtggacataaagtaacactggctgagaaatcagacaaacttggcggacttctgtatttcacagacgtagatatcgacaaaccggatcttcgtaatttcaaagatatgatgattcgtgaggtaaaacgtcatgacgtggaaatccttatgaatacagaagtgacaccagaattcatcaaagaatttgcaccggatgcggtaatccttgcaaccggttctgttccggcatgcccgccaattaacggtattgaacatgcacatcaggcaatgtctgtatacgatggaacctgtgagccgggcaaaaaagttgtcatgatcggtggtggtctggttggctgcgagacaggtctttacctgcagaaaacaggtcatgaagtaactgtagtagagatgcttgaccgtgtggcaaatgagtccttcggtatgtaccgtgaggctctggtatgggagatggagaaaaacaatatgaccatgcttccaaaaacaaaatgtctggagatcacaccgaacagcgtgaagattgaaaatgcagatggtgttcaggaacttgaggcagatactatattgtatgcacttggtatgaaatctgtggattacagtgcgctgaaagaagcggccggagatgcaagtgtgtatgtgatcggtgatgcaattcatccgggtaaggtagatcagtgtaccagaacgggttatattgcagcactgaaagttggagcaagtgaggagtctgtggcttatatccaggagtaaaacttgcttgtgtagataaaaaatatacttttatgaagagaaatccggcaattttgtctcggtcgctagcaatcgctccctgagaaaaaattgccggatttttctatctacatagtgaagtatatggatttttcattcacgccggcgctgcgtgccagttgatcgccagcaatcgctccctgagaaaaaattgccggatttttctatctacatagtgaagtatatggatttttcattcacgccggcgctgcgtgccagctgatcgccacatctgcgagaaaaaaatgatggaaggtgaagggcatgtagaacttgcagggaaactttttgcgtgatagtataaacgaaggtagtaaagaggctgcgttcatgagtaagtagcaaaagtggattgcaaatgtccgctttactgcagaaaaataatagaaaattaaaggaaacgatcactgtgaaaaaagcaatgaaatccacaatggtatttgctgttttggcaacaatcgtatttacaattttatacaggataacggaaaacggtgtgctgctgtcactggctatcacggcaggaacgatcagctatcattttgtcatgcgttatacagttgcgggggttttcagtcatactatgcacaatcgggcaaatctgtctcgaaaatggtatcagcagaaaaagtgggaaaaaaaattataccggaagctacatgtaaagcaatggaaaaataagatgccgacttatgagccgagctattttgacctgagattacatacaccggaagaaattgcaggagctatgtgtcaggcggaagtaagccatgaagtgatcgtgatattcagttttcttccattgtttacagttccggcatttggtgcattctgggtgtttttaatcacatcagtattgtcagcattaatggatcttttatttgctattatgcagcggtataatcgaccaagaattttgaaactgtgcagaaaatagagaaaaatgatatgaaaacggaaaaaatatcggtgggattgctaaaacgaaggcaggatgtggtataaaaatattacattctgccttttttgcatatcttcgcttttaatgattaaaaaatatcaaaaaagtgttataatgaaaaagatttatcaaaaaacaacatgcgaactatcgtgtgaaaatacataagaggaaaataaaacattatgacattaaaagaattggaaattggtaagagtgcagtgatcaagaccgtaggcggcgaaggtgccctgcgtcagcactttttagatatgggaatgatcccgggagcggaagtaacggtggtgaaacttgcgccgatgggagatccgatggagttacagatccatggttatgaactgacactgcgtctggcggaagcggatcagattgagatcgatccgattgaaaaacgaagcaatgagcataagcgtaccgtaaaggaacttggatctgagcatcctggtattggtgagaccggaaaatttcattcgaaaaaagatgaaaatccactgccagagggaacgatactgacctatgcgttagtaggaaatcagaactgcggaaagacaacattatttaatcagctgacgggttctaaccagcatgttggaaatttccctggtgttaccgttgaccgaaaagatggttccatcaagggtcacccggagacggatgtaacggatttgccgggcatttattccatgtctccttacagcagtgaggaaatagtatccagaaattttgttttaaatgaaaagccgaaggcgatcatcaacattctggatgcgacaaatattgagcgtaatctgtatctgaccatgcagctgctggagatggatattccaatggttgtggcattgaatatgatggatgaggtgcttggcaatcagggttccattgatatcaatggaatggaagcactgcttggtgttccggtgattcccatttcggcggctaaaaatcagggcgtggatgagctgatcacccatgcgctgcatattgcaaaatatcaggaacgtccattgcggcaggatttttgtgataagacggatcataacggttcggtacaccgctgtatccatgcagtcattcatctgatcgaggatcatgcgcaggcagcagccattccggtgcggtttgcggcaacgaaagcaatcgagggtgatccattgatcctggaacagctggaactggatcagaatgagcgggaaatgctggagcatattgtacagcagatggaggcggagcgtgaggttgatcgaagcgctgcgatagccgatatgcgttttgactttatcgagcgtctgtgtgagcagaccgttgtaaaaccaaaggagagcaaagaacgcatccgcagtgagaaaatcgaccggattctgactggaaaatatacggcaattccatgttttattggaatcatggcacttgtattttatctgacattcaatgtgatcggagctggtttacagacactgcttgaaattgggattgataaattgtcggccattgtggatgctgcgatggcagccacacatgtaaacagcgctatgcacagccttgtgattgatggaatttttaccggagtgggaagcgttttaagtttcctgccgatcatcgtgacactgttctttttcctgtctctgatggaagacagcggttacattgccagagtcgctttcgttatggataaactgctgcgaaaaatcggactttccggtcgaagtatcgtaccgatgctgatcggatttggatgcacggttccggcggttatggcaacgcgtacgctgaccagtgagcgggatcgaaaaatgacgattttgctgacaccatttatgagctgtacggcaaaactaccgatttattcgttctttgtcagtgcattttttccgaaaaaaggcggactcatcatgactgggctgtatctgcttggtattggcgtcgggattttaattgcgttcctttataaaggaaccttattcaaaggagaaccggttccatttgttatggaactgccgaattatcgtctgccgggagcgaaaaacgtgacacagcttttgtgggaaaaagcaaaagatttcctgcagcgtgctttttccgtgatttttattgcaacgatcgtggtatggttcctgcagagttttgatctgcatatgaatatggtcacagattctgccgacagtattcttgctgcaatttccggcattttggtgccgatttttcgcccacttggcatgggagactggcggatctgtacttccctgatcagcggatttattgcaaaagagagtgtggtatccacgctggaagtgttgtttggcggaagcataggaactatgatttcttctctgacagcagcatccattctggtgttcagtttgttgtatacaccgtgcgttgcagctgtcgcatccattaagcgggagcttggagcaaaatgggcagttggcgtggtcatctggcagtgtgtgattgcatggattgcggcattaatcgtacatctgatcggattattcgttggaatagtgtaagctaagactgataagattaagcaagcacgggattaatttgcaaaggtagcaggtgatttaacataacgtagtagaagtggcaggataacgtttttc

SEQ ID NO: 13383 - DNA, 812 bp, Unknown
  gut microbiota DNA sequence
tccatttttcataactttccgtgtaaccaaccaagagttcacaaaatcttcacaattttttagcactcaaggcttgacgtggctaataataagtgctatagtacaactagaacaaaggaagagagataaaaggaatgaagaaaagttccaaggatctcaaatccaattgctcaagcaatcaacacttcggattctccgaatgtgcagaaaatatatttaattactgaaaggagtaatgacttatgatgatgcctagaatttttggagaaaacttatttgatgattttatgaacgactttgcattcccggattttacagacagtgcaaatattgagaaagctttgtatggtaaacacgcaaagaacctgatgaagacagatgtcaaagataccgagaacggctatgaagtagatattgatctcccgggcttcaagaaagacgagatcacaatgaaactggagaacggtacattgaccgtcagcgcagcaaaaggtcttgacaaagacgaagagaacaaggagaaaaaatatgtaagacgtgagcgttatgcaggcagcatgagcagaagcttctatgttggtgagcacgttgacgttgaggatatccatccgaaatatgaaaatggtatcttaagcttcgtagttccgaaaaaggagcagaaagcggtagaagagaaaaacaaatttatatccattgaaggttaatgtgaattttcaataaaaatcttgaatgaactctccctgagtagatccccggcaggacgtaaaaatcccgccggggattttttgctttataggaaagttctcctttgg

SEQ ID NO: 13384 - DNA, 3189 bp, Unknown
  gut microbiota DNA sequence
gttttccgatgaaaagaaacggtttgcattaaatgatatcgtgcatccggcggtaaaacagtatgtcattgatgagatgaaccgtgagcgtgcggcacagacacacgaagtgctgattctggaagcagcattgctgattgaagaacattatgatgaaatctgtgacgaactgtggtatatttatacctctgaggaaaaccggagagagcggttgaagttaaaccgcgggtattccgatgaaaaaattgataacatttttgccagtcagcttccggaaagtacttatcgggaagtatgcaaggcagaaattgataacaatcatctgccggaagatgctttttgccagattgatgagttgatgaaagcacgtcaggtagaaaaaacgcagggatgatcctgtgatacaaagaagtgtatattttttgatagaaaaatgtacagaatcgttagacaacggaggaataaatggaattatgtagtatagcaagcggcagcagcggaaactgtatttacgcaggcgcggatcactgccatgtccttgtggatgccggaatcagcggtaagcggattgaagccgggctcaatgagattggactgaaaacggctgagatggacggaattcttgtgacccatgagcattccgatcatatcaaaagccttggggttctggcacggaaatacgggcttcccatgtatgccacccagggaactattgatgccatcaaagaaaagtcatccattggaaaagtggacgaatccctgtttcaggtgatccacccggaggaggattttaccatcggagatatgcggatttccccggtgccgacatcccatgatgcggcagaaccggtggcttatatgatgtatcagggggataaatccatgggaattatcacagatcttggaaaatatgatgattatattgtagacaaattgcaaggattggatgtattattgttagaagccaatcacgatgtacatatgctgcaggcgggtacttatccgtatcagttgaaacggagaatccttggtgatcgcggacatttatcaaatgagttgtccgggcagctgcttggcaaggtattgcatgatggttttaaaaaagtgattttaggtcatttgagcaaagagaataattatccacagcttgcatgggagactgtacgactggaagtgaccatgggagaaaatccatacaagggcagtgattttccaatggtggttgccaaacgggatgaggtttctgaattagtgacgatttaatgttactttttcgtgcatcacgggtatccatgtaaagtacatatttgcaagatgagaattgcatagaggatgatcagtataagctttgtggccgcaattttgagagaggagagcgcatatgcgcgaaaacacaatggaaaagacaacagacagaacaattatcacagtagtaggaaaagataccgtaggtattattgcaaaagtatgtacctaccttgcaagtaacagtattaacgtacttgacatttcacagacaattgtacaggatttctttaatatgatgatgatcgtggatatgagtacctccgcaaaaccatttgcagactgcgtaaaagaattagagcagatcggcgaagaaattggcgtaaagatcaaatgccagagagaagaaatttttgatatgatgcaccgtatctaaaaatattggataagtgacattgttaaacgaaacgacgggaaaatgaatgaaaacgcgagaaatcctgttgttttcaaaaagagattcagcactggaaaaaggagattacgaccaatgataaatatgtttgaagtaaatgagacgaacaagatgatcgagcaggaaaatctggatgttcgtaccattacactgggaatcagtttattagactgtattgattctgatttggacaaagtaaatcagaacatttacaataaaatcacaaccttagcaaaagatctggtaaaaacaggtaaaaccatcgaaaaccgttacagtattccgattgtaaacaaacgaatttcggtaactccgatcgctatgatcggtgcggctgcctgcaaaaagccggaagattatgtaacaatcgcacagactttagaccgtgtggctgcagaagtaggtgtcaactttatcggcggatattccgcactggtaagcaaaggcatgacaactgctgacgaactgttgatccgctccattccacaggcacttgcctgcaccgagcgtgtatgcagctccgtaaaccttggttctactaagaccggtatcaacatggatgcagtacgtctcatgggcgagatcgtcaaagagaccgcagaatatacaaaagatgcagattcacttggatgcgcaaagctggtagtattctgtaatgcaccggatgacaacccattcatggcaggtgcgttccacggtgtgacagaagcagatgccatcattaacgtaggtgtcagcggaccgggtgttgtaaagactgcgctggaaaaagtaagaggcgagagcttcgaggtgctgtgtgagactattaaaaagacagcattcaagatcacccgtgttggtcagctggttgcaaaagaagcttccaaaatgcttggtattccgttcggaatcattgatctgtctctggctccgacaccggcagttggcgacagtgtagctgagattcttgaggagattggtctggagtatgccggagcaccaggtacaaccgcagcattagctatgctgaacgatcaggtgaaaaaaggcggtatcatggcatcctcctatgtcggcggattaagtggtgcgtttattccggtcagcgaagatcagggaatgatcgatgcagtaaaagcaaatgcgttgacactggaaaaattagaagctatgacatgtgtatgctccgttggtctggatatgatcgccattccgggagatacaccggcaacaacgatttccggtattattgcggatgaaatggcaatcggtatggtaaaccagaaaacaaccgcagttcgcctgattccggtcatcggaaaaggcgttggcgagatggtagagttcggtggattgttaggttatgcaccgatcatgccggtaaatcagtattcctgcgcaaactttgtaaatcgtcagggacgtattccggctccaatccacagcttcaaaaattaaccgtacagttcacttgtcacatgtatcta

SEQ ID NO: 13385 - DNA, 17012 bp, Unknown
  gut microbiota DNA sequence
aaaggtaggtataaaaatacgttttatttccgttttgcaacaaaaaaatagacaacgttgtgaatctgaaacagtatcagttttgcaacaacaaaaaaacccgaaaaaccgtgcatttttgtaaaaacaaaattggcacggtttttgcattatataaaagcgtaacaacaaacaataataaaaaaattatatataagaaaaggagaaattataatgtcagaaatcgctgtaagacacacgcgtgaagaaaactacgcgcacacaaatgattggaaaaaaccttacgacggaaatatctttgatatgttcaaagatggctcttttgagctgatcgatctgtccaacccatttggtagaggaaatccactttggccatccaacggagatttccatatcgacagagtacagcatatgccgatgcattacagactgcttcagactttcaactcattccatatgcacaactctacacatgcagattcaccggctcatgttattccggagagcccatacacacatgaacttccgatccagaactactttggtgaagctgtttgtcttgatatcccgaaaggaaaatgggagctgatcactgtagaagatattgagaacgctgcgaaaaaagttccaggcggaatcaaagaaggtgactgggttctgttaaatacaggtacacacagacgttggggtgagaatgatgattatttcgcatacagcccgggactttctatcgatggtgcaaaatggttcgttgagcatcacgtaagaggtgttggcttcgatatgcaggcaatcgaccacatcctttatacatatgcagcagatcacggccctggtccatacgttccgcgtatctgtgaagaatacgaagaacagttcggacatccggcaaaagacgattttccggagtgggagccatgtcatgatatcttaatggcaaacaatgtaatgggtatcgagaaccttggcggagatctggataaagtaacaaaccagagattcttattctgtgcattcccgcttcgctggtacatgggtgatggtacaatcgttcgtgccgttgcatttgttccatctaacagaatcgacagaagtgtaccggacaaagagtatccgtacggcgtatactaagagttaaggatacgatttaacgattaacataccgcaaacataactgttcagagctgggttacagattcctgaacagaacaagtaaataaatgaataaggagccagacatcagaatatggtaactgttcagagcagtaaaaactaaataatggctctggacggagataccgcatgggatgtccggctctatttttgagcaaaaaaaggggaaactatgagtaaaaagaatattgctgtccttggtgcaggtaaaatgggactgggaattgcccaacttttcgcaacaaagggacatcaggtaaaagtaatttatgtatatgatgataagatccgctgtgatgcagccgcagttgtaagaagcaacttgagcgtattagttgagaatgatgtaatgacacagcaggaagctgacgatgcagctgcaagaatcagctttgtagacaccatcgaagaagtggcagattttgcagatatcgtattcgagggaattattgagaaactggagatcaaacaggattattttgcaaaaatggatgcgattttcccggtttcaacaattcttgcaacaaatacatccgcgatcagtatcacagagattgcagagaaatccgtacacaaagagcgtatcattggtactcactactggaatccggcttaccttgttccgttagtagaggttatcaagacaaaatatgtatctgatgagacggtacaggctacttacgatctgttaaaagaagcaggaaaacgtccggttatcgtaaagaaagatgttccgggattccttgcaaaccgtatgcagcatgcattattcagagaagcattaaatatcattgagcaggatatcgctgatccggcagatgttgatgatgcaatcaaatatggcttcggtatgcgtcttggcatctgcgcaccggtagaagttatggatatgggtggactggatctgacttacaacatccacagctatctgttcccgcatctgtgcaacagtacagagccgtccaaacttctgacagacaatattgcaaaaggcaaccttggcttcaagaccggacagggacttgaaacatggtccaaagaagatgtagaaaaagcaaacaaagaactgacagagggactgatcaaagttgcccgcgttcttggccgtttataggaggaagttaaatgagagacgtagtaatcgtagcaggatgccgtaccccgatcggtaccatcggtggtcagtttaagacacttgcaccggtagaattaaccattccggttatgcagaatctgataaaaagagcaggcattgatccagtaatcattgacgatgtcatctggggatgcaactaccagagaacttacaaagaaaataaccttgcccgtgtagcagcagtaaaagcaggtctgcctgtaactgtaccgggtattaccatccatagaaactgtacctcatccatgtctgccatccagatgggattttatcagatccgtgccggagaagcagagtgtatcatggcaggaggttctgacagcatgagtaccgcaccacatatggtattcaatgcccgttacggacagaaatacggtcatatggagatgcgtgattccatgtgggattccctgacaaatctgggtgttggaccggctatgggtatcacagcagagaacgtagctgacaaatacgacatcacaagagagcagatggatgcatattctctccgttctcagcagcgtgcagtagcagccatcgatgcaggacgttttgaggaagaaatcattccggttactgtaaaatccagaaagagcgagactgtttataccgtagatgagtatccgaaacgtaacgccacgttagagggacttcagaaactgaaacctgcatttaaagaaggcggaaaagtaacagcaggaaatgcttccggtatgaatgatgcttcttccggtgtcatcctgatgtctgaagaaaaagcaaaagaacttggctgcccgatcatggcaaaggttgtcagcgtagctacaacaggtgtagagcctgaattaatgggaatcggaccgatcagctccacaaagaaagcactggagaaagctggtctgaccgtagatgatatcgatctgtttgagatcaatgaggcattttcttctcagtgtctggcctgccagaaagaactcggtgttccggatgagaaactgaatgtaaacggtggtggaatttctcttggacatccggtaggagcaaccggttccagaatcgtcatcacactgatgtacgagctgaaacgccgcaaacagcgttacggtgttgcaacactttgcgccggcggtggaatgggaacaaccgttgtcattgaaatgtgtgaatagtagataatattaaaattattcctgtaaattcaatgacttagaaaaaatgtactctcggaattcatcgtttaaaagattccgaaattacataaaagagcaatggaggattgcgtgaaagattttgaattttcttttccaacgcagatcattttcggagcggatgcagaagaaaaaatcggagctctgtcacagaaatacggacatcgtgcgatgatcatttacggaagcgaacgtatccgaaacaatggtctgtatgaccggcttgccgcaaaactaaaggagtatggagtgataagcctgccctttggcggtattgccgaaaatccgcgtcttataaaggttgatgagggaatagacctggtgcggaacaatgaaatagacctgttgcttgccgttggcggggggagtgttatagatacagcaaaggcaatcagccttggaagctactatcccggagatgtctgggatctgtatgaacagaaagcaaaagcaacagaagtgctgcccatcggcgttgtactgacgatggcggcaactgccagcgaagcaaacggagtctctgttatctggaatgaagaacaaaatagaaaatgtgcattgacggacgcacgggtttgcccgaaatttgcactcatgaatcctgaattgacctacacagtgcctgcacgccagacggcggcaggctctttggatatatttgcacatgcatttgagcggtatattgtgcggtcacaggaaggggtattgcgggatcatctgtgcgaatccatcatgcagacagtgatcgaagaactgccggttgttctggcagatccggcttccaaggaagggcgcagcgaactgatgtggacagcgaccatggcacacagcaatatgatcggttttgaaggggattatgcctgtcatgcggtttcccatatttttacggaactgtttggactgtcccacggagaggcacttgcaatcctgatgccggcgtggtgctgtatgatgagttcgcgggaaccggaatttatgaaaaaattcttttcccatgtatggcacgccgaaggcggggatgatgaggcgctgctctgggacggtgtgaagcgcttttaccgttttatcagtagctgcggactggcaacaacgctgaaggaagctggatttattaatgtggataccgaccgggtaacagacaaagtactgcagggtgaaacgcagtttattggcggcggatttcaaaaactctatagacaggacgtgaaaaatctgattgaattgtgtttataagatatcgacagaacgaaagatgagaggtgcataaaatgacagatttgacattaaatgccagacagaagaagttgttatcgattttaaacgcaagacacaatgtagagacaggcaaagagctggcagcaaagcttggcgtgtcggaacgaaccgtccgaaacgatatccgcgagatcaacagcaaattaaaacagtatgaaatacagattcttccccagtatggaaaaggctacacgatatctgtcaacaaccgtgaggtatatctgcagcttttttcggaaaaagcaaactatgagacgaaggaagaccgtatccgaacgatgatgctgcggctcatccgggaaaatgactggtatgagcttggcaacctggaggatgaaatgttcgtcagccggacaactttagagagcgatatccgcgccatgcggcagcgcgtatctgtgcgttatccgtatctgcagatccagcgtcagggaaattatatcaagtttgagaaggatgaaatcaagcggcgggcacttctgatccgtctgtatgcggaaaactgggattatgattccagagacggaatcgtgttaaagcaggatgaatttggcagagaacgtctggaagaaattcaggatgtgttcaaggatgagctttaccgctgtcagaccgatctggatgatttcggactgatttatatggttctggcaattgcggtcatgcagtttcgggtaaatagcggcaatacgattgaagcatttgagaaaaaaggcgagtctcaggggattgcggcagtcgtccgctacgtgctggatgcgttaaaggaactgtggcagattgaactgcagcagaacgaatatctgtggctttcggatattttttatcagattcagattttaaatacacgaaatatgaccaaggcagcggtgcttggatacacgagcccggtctgtcataagatcgttagagagatgctgcaacaggtaaaagcggtgtatggattggattttaccacagacgaccggttgtttgccgatctgtgtgtgcatgtacagaccttgaaaaacggtattatcgcgccgcagattcagcatcatgtctttggcgatgaactgcggaaccgttatcccctgttgggggatatctgccacttcttaaagaactgtctgggacaggagtgtgaggtgcttttaggaaaagatgaggaagattatctgcttccgtttctgatttccgcacagcgtacactgtatcagaagatccgcggcaaagggctgtccaccgtagtgatcagccatttcaatggaagcgttacacactttctgatggaacagctgcagaaattttacggtgacattttagatctgtacggaccgtatccggttcacggcaaggaaagggcaaatcaggataagcctatgctgatcatcacgacagttcggatgaaggacttccggcgtctgtttcatgcgccgatgctgacggtatccccgctgttggatgaggaggatcaggcgcggctggagcactgtctgacagatatcaaatgcaaattgttatatccggagaaaaaacgtgcgattcaggattatatccgaccggatatgatttataaaatgaaaaataaggatagcctgtccagcgttatcgctgccattcaggatcgtttttatgtaaaaaaatacatggtagaaaaagtggcagttgatctggaaaatgactatctggcgattttaccaaatggatttgtgtttatgtatcaggaagatgcctatattacagatacagtagtcagtctggtaaaactggagcgtgcgatttcctggaaacatgcccgtaatatccgtgcaattatgtttatggcgcttcgcccggaggatcggacgcagcttggatggttctatcatctggcatttgaactggcaggaaatatacaattactggattcggtgatcgaaaaggaatctctggaaaatatggataaaaaatgaattgggaactgtgtaaacgaaaaggattaagtaaaaaggagagggacagctatggatgcaaaatatattaaagcaatgaaaccgcgtgatctgacagaagaagaaaaacagagaccatatgcgaaactgttttacaaaccacagccggatatcagtgacagaacgaaaaaagtactggcaagcggtgagccgatggatccgaaatatgcgatgacaccggataatatccgtgaaaaaacagtacatatccttccggaagaagaatgtggatggtgttatctgccgggcggtggtgcttatgtcacgaaccgtcatgatatgccgggagtcacagtggagatgtacagacactggttatactggtggaatgagattccggaggaaagcgaaatgcgttataaatgctggtgcccggattcccatcattgcagtgatttcatgtggagtactgaaaatatcggagattacatgttagatctgacactgacagatccgctggcagatcacccggaagccatcggtctggacgaggagatctgcaaagaggcaggtatccttatggtggacggtgccagtgcaaggcagaaactgttcagcacagatctggaagaacacccggttccggcagtcgtaatgcattttgtttatgatgcgccggatggaatcattatgcgaagtcatttctggatcggttttcaggcaatgggcggaaaactggtcaatgtaatgggtgagcgtccaatgccggagaaagatctgcttatgggactgctagagcacaacagcaaagagatgaacaatctgagagatcttatgccaatcctgtatacagagttccgtaataaataacagataaaataaagtttatgaaattatgctgaaaaaagaaccgtgcggagggttgccacacggttctttttctgttgcttttttataacgttactatacatgaggagggtataggagttatagagcaggattatttcggcttgaggctgcctgaaattcctgccttgatctatatgttgtcaacagtggtacggaaactgcgtaaatccgcatccagatgctgatacatatctaagtaatacgggtagagtttgtcataaactgcttcccattccggaactggttcgataacttctttgaccggaatcagttccttgatcgtctgagtcagatcggagaatacaccaacggcagtacctgcgatcaggacatcaccgaatggcacatcgccggagcgctcatccagaatatagatcggcatatgaagcatagatgctttgatctgtgaccaggtacggcttttggaaccgccgcctgtgatgcgtaagcattccgcctgtccgccggcttctttgatggtctccataacatgtctgagtgcaaatgcagttccctcaaatacggaacggacgaaatgtttgcgctctgtgttcagagacattccgatgaacatacctcttgaataggaattccagagtggtgcacgttcaccgagcatatatgggaaaaagagtaatccatcggaacccggagctacttctaatgcttcacggttcagatattcatacacgttaatgccaagttcttccgcttcttctttatcagcctgtccgaaggtatccagataccatttgatggaagcgccggaagcgttgattggtccgtcaaaaatatatggcatgccgtcaatggcacatggttttgtgacaaccggaacatcggaacggctctgaaccggagatccgacaaatacgagagaagttgttccggaggactcacctgcttcaccaagctggctcagtccggttgcatacatggaagccattgcgtcgctgcatcctgcaactacaggaataccgcttaccagtccggtttcagcagcagcttcttcggtaactgtaccgatgatatctgtgatcttggacggctgtggaagtaatgcattaaaatcgacatccagtactttggcgatctcatcagaccatgttaaagaattgatatccagacactgacatctggaagcgcagtcaaggtcgatggtcatctcaccggtcagcttatagttgataaaaccgtttgcctgtaacagtttttctgtttttgcaaatgcttccggttcgtgttttttgaaccagagcagttttcccggtaagaatgcagtacttggctgtccgccaacgatggatacgaaatggtcaaaaccaagggtatctgtaatgtagtttaattcttcatcggaacgggtatccatccagatcatagcgtttcttaccggatttccttctttatctataggaagtaaggaaattacgtgagagctgatgctgataccgcggatattttccacgatctctttgccagcggttgttgttatttctttaaaaacagcttttgcattgtcccaccattcatttgcatcctgttcgatctggtttgctgccggaaagatcaggtggcttggacgggaagctgttgcaatgacatttcctttggtatccataatgttcgccttaatatttgtggttcccatatccataccaagtaaatagttttctgccatatcagaatcctccttaaatatgagccttagtaaatacctttaatacgtattatttatatgatgtaaaccttataggaaagttttttaaacaggatcatttctatagggtaatctgagtgtcaaaagggggggagtatctcatattgaaaaagttcaagtcttcatagtcagtagtagttcctcttgacactctgatgttataaccactgtagcaaacggcacaaaaagttgcaatttatatatttccgttatctaacggcaatatcgtgtttgccgctttttgccagatttcatatactagagccagaacaaagcacaaaggcgaaaaacaagttgaaaaatggaaggagataattgttatggcaacaatgaaggcagcagtaatgtatggaccaaatgatatcagatatgaagatacagaaaaaccggtttgtcctcaggacggtcttattttaaagattatggcagttggtttatgtggatctgatatcagaaaccttacttcagattccagaaaaggaaattatccttttatttacggacatgagatcgtaggtgttgtagacgaggttggaccggagacaacaaaatataaagtaggcgatcgtttatacttattcccgggaacttactgtatggaatgtgataactgcatcagcggtcacagcgagaactgcgagaacgagcatgtagcaaaacttgcaggaacaggcggattcgcacagtacattgcagtaggtggagagaagatcaaatacggcggaatctaccgtattccggaaggaatcaaatatgaggcagcaagccttggtgagccgctgacatctgtatatgcatgcgaagacaacatcggtgttggttacaatgatgtagttgttatcatcggtgcaggtccgatcggatgcttcatgacaaaacttgcaaaattacgtggtgctaaaacagttatcatgatcgacatcaaccagatgcgtctggatcaggtaaaacagtttggcgctgattacattatcaacagtaaagatcaggatccggtagcagcagttaaagaactgacaaacggaaaaggcgcagacaaagttatttctgctaacccatccacagcaacacagcagccggcacttgagatggtgaaaaaaggtggtctggtagtattcttcggtggcgttccgaaaggagctatgacagagcttgatacaaacctgattcattacaacaatatctggatcaaaggacatttcggtgcttcttacatgcagtccaaaaaagcatttgagcttgcaatctcaccggaatttgatgcatccaaattcgttacacacagattaccgctggaagatattacaaaaggtattgagctgacacgtacagaggcaatcaaagttgtattattcccgaacggaatgaatccggacgaggaggcataaaaatgggcagagaaaagtattgcggcaagcagttatatccgcatcttttcgctccgatccgcattggtaaccttcgtttaaaaaacagaattatcgcagcaccgacaagcccgagcatgatcacaacagatggtcatttcactccggaaatgaatgcatatctggaggaaaaagcactgggtggcgcagcggtagttacctatggagaggcgattccgcactccaagacaggtaaatctcacaataaacaactacagttggattcctttggtgtaaaacagatgatgaaagaaagcaccacagcgatccacaacgcaggcggatatgccaatatccagctttcccacggcggaatgtacggaggactggcaagtgtcggcggagacatcggatgttgtgagatcgcatacggaccgagtgatatgatgatgccggcaggaccggtaaaagaaatgccgaaatcactgatctatgagattgttgattcttataaaaaagcagcaaaactttgcaaagactgtggctatgacatggtaatggtacatgcagcccatggctggctgttttcacagttcctttcccctgtcatcaaccagagaaaagacgagtttggtggttctctggaaaacagagcacgattcctgatgatggtattagatgccgtccgtgaagctgttggaccgagattcccgatcgaatgtcgtttatccggtgatgatatggcagataatggtctgaaccagcaggattgcattgaagttgcaaaattaattgaagataaagtagacctgtttaatatttcctgtggaaatcacgaagatccggcaatgttctgcagaacacatccatcttctttcttcccgcgtggcgtaaacgtttacctggcagcagagatcaaaaagcatgtcagcaaaccggtagcttgtgtaggttccttaaatgatccggcacagatggaagagatcatcgccagcggtcaggcagatctggtagagatcgcgcgtggtctggtagcagatccgtacctgccaaagaaagctctggaaggcagagccaatgacatcaacccttgtctgagatgttatgagtgttttggtgagacaggaaagagcgagaccgtaaaatgtacggtaaacccgacacagggacagcagttattctgcaagacagatccggagaaagcaccgacagaaaagaaacgtgtgctggtagccggtggtggtccggcaggtatggaagcagcgattaccgcagcagccagaggacatgaagtaactctggcagaaaaagcagacaagcttggcggcaacttgtatccggcaggagcaccgtatttcaaagaagatatcctgaaattatgtaacgtactgatccggcgtgtggaggcttccggcgtgaatgttgtactgaatacagaagtaacagcagattatatccgtgagtttgatccggatgcgctgtttgttgcgatcggttccaacgaactggttccaccgatcaaaggaatggatctgccaaatgtgatcatggcgatcgatgcagagcttcatcctgataaacttggtgagcgcgtagcgatcatcggtggtggactggtaggagcagaagcagccgtttccttcgcgcatgaaggaaaaaaatgttccatcattgagatgaaacatgaagtagcagaggaagtaaattctttctaccgtggtggattaatgccacatgtaaaagaaagcgctgctctctatacagatacaaaagtaaaagagatccgtccggaaggtgttgtctgtgagaatgcagatggcgaatttctggtagaagcagacagtgttgtctgtgcagttggtttccgcgcaccgtatgcaactgttgacgagttctgtgatctggttgacgaatcctacatcataggtgactgcaacaatgtggcacagatctatcaggcaatgaatgcagcatactgggcagcaagaaacgtataagaaatgaatatcccctcatgggggatataaaacattcaggtaataataaacaaattcatctcagtctaagattaatctccgactgagataaacgctccgcgagaatatgcagtgattctgagaagaatatgtcagcttacactgaccagaatcacgcaccaagtctcacatgcgttcaacttgaaatataaaggaggacaatccaatggcatataatttttttgtacataacgatctgacatttggaaaagatgcagttcaggaactgccaaacattcttgccggcgaaggtgtaaagaatgtgatgatcatctacgatgaaggcgtaaaagtagccggaatcgctgagaaagtagttgctcaggtagagaaagcagatgtagaaatcacaatttttgataaagttttaccaaacccatccaacgagctggttgaggaagcagcagctatcgctcaggagaaaaaaatcgacggttttgtagcagtcggcggcggaagcagcatcgaccttgcaaaagcagtaaacgtattaatgacaaatccgggaccgatcggtcagtatggcggaatcggactggtaaaaaataaagttcacccgctgatcgcaatcccgactacagcaggaacatccagtgagatcacaaacgttaccgcactgacagatactgttgcagtatgcaaatacgttgtcatcgataacaaactggttccaagccatgttatcgcagatccggagttcacaagaacaatgccgaaatctgttacagcagcaactggtatggatgccatcacgcatgcagtagagagctacatttccaatatggcaactccgctgacagagtacaactccatcaaaggtttacagatcttccgtgagaacctgccgaaggcagttgcagacggaaacgatatggaagcaagagagaacatgatgcttggatgtatcatcacaggttttggcttctccaatgcaaaccttggtctggtacacggaatcgctcatacattgagtgcacatttccaccttgcacatggtatggcaaacgcaaccgtacttccgtatgttatcgcatacaatgcaccgagctgcccggagaaaatggtagatcttgcaaaagcaatcaatcttccgctgacaggcaacatcgaagaagatcagtatgcacttgcaaaagagctggaagcactgacaaaagaacttggcatcaaacgtctgtccgagcagggtatcaagaaagaagatttcgacatgcttgctgatgacgtattaaaagagccggtactgaacttcaacccacgtcagggtattacaaaagaagacgttctggcaatcttagagaaagcatactaagaaatgcattcttgaacagtattaaaatttgcgtgaaagcgcataagaaaacagctaacaaaatggggcaaccatttcatattaaacatctcaaattgaaaggaaggtattcaaaatgaaatacgaaaaaatcagaaaaacagttttagaggcaattttagaggcagtagatcagggactgatccatggtacatccggaaacatcgctatgagagatgacgaggatgatgtaatcgcaattacaccaagtggaatttcttatacaggaatgaaaccggaagatatcgcaatcgttgacttaaacggaaaatggatcgatggaccatacaaaccgtcatcagaagttccaatgcatacagcagttatgcgtgccagaccagatgtaaaagcgactgttcatacacacagcatgtatgcaaccatcatggctatgggcgagaatccggaattgaaaccgattacaccgccacagtgtgagttcacaccggttggaatcgtatccttcacaatgccaggttctaacgatgtagctgataaagtagtagaagctttaggcgagaaaggccgtgcttgtctgatcaaaaaccatggtatgttcacatgtggtaaagatatgaaagcagctatgcatgcaacaatctacacagaggagatggctcagacaacatatcttgcaaaagtacttggaacatatgagccaatgccggaagaagctgacaaagctatgaaagcattaatcgcagctgatcaggcagtataaataccgccatatatgcacacacgcacgagaggaaagtattctttaacgtggcgcaaacaggaaaaatgtgcctgatgaatttttgatgataaaaagtcatgaagcacattttcctgacattaaaaacaatgaaaataattgattagttttgggagaaaaacgacatggcaaagaaaaaaatggctttatgtactccgattcctgagaaagaactggaggcaatcaaagaatattgtgatattacaatctgtggtgagttaaaacacggaaaaggaaatgtgacagaagaaatgacaaaagaagagtgcatgggcaacgagctcatcgttcttggtgatgaatatgcaggcacagataccatcaatgcatgggttgacgctggtatgaaattcatcggagttgcaaaaggaacaccggttaccgtagatcatgatgccatcgtaaaagctggtctggatcttacatacacaccgggtagaaatgcggtagcagtagcagagttctgtattggtctaatgatcgcttctacacgtaaccttgcattaagctgcgtaggtctgcagaaaggtgagcatcttggtgcaccggtagatgatatctacaacgttccggaagagaaaaacgttacatggggaccgcttgacgagaatcatccttacacagattacggtatcggatttgagttatatggtaaaaaacttggtatcgcaggttatggtgctatcggtcgtgaagttgcaaaacgtgcaatggctttcggtatggaaattcttgcatatgatccatatatgccaaaagaggcagtagaagctacaggcgctgagtatgtagatcttgatacaatgctttcccagagtgatatcgtaagtatccaccttccggtacttccgtccacaaaagcaattgtaaacaaggactggttctccaagatgaaaccgactgcttatgtgatcaacacagccagagcagcagttatcgatcagaaagattttgtagaagctcttgagaacaaagtaatcggcggcgcagctgttgatgtatattggcaggagccggttccggcaaaccatccgttactgaaaatgagaaatgtaacatgtacacctcattatgcaggattaacaacagatgtagacaactggtccggaagaattatgtctgagaatatcatggcatacttaaaaggcgagccggcaaaacatatctggaaagtaaaaaaataaaacagaaatgaaacgcccagggggagaacgtgatatgcgttctcctcttttttgtttatctcagtcgagaagactcccacttctgcaagtagcgaaagtggattgcgaatgtccgatttaccatgccaaatattaagagaaaacggacttattgaaaattttgttcagaaaaataatttgtctccttaatgtgctaaaatggcatgagatttgcgtgttaaaatagtaaataaaaatgtatagcagggaggaattttactatgaatggcattgcaaatgaacgactgggacaatcattacaggcgtttgagcaggctttttctgattttttccagccggggcagagtatggaaaaaatcagaaaagacagtgaaacaatgcgttcgattgttgcagaaattttatttgtgttgcagagtgacaaaaaagatgcggattttataccgcatgtgctcatggaaaaggagaagcatgagtggtcagagtgtgaattattatcggaggcattgattaacgaatatcatgtgccgaaaaatgcagctctggcagtcacgatgctggcgtggtgcaaatatttacttcggacagatctggatgcagtcgtgatctgggcagaacaggtatggaatgtgaccaatccggacgtttcaccaagtacggtagcacaggagggaattgcccgttttcaggattttatcagtcagtgtggactgtcagtaacacttcgggaatacggattgcgtaattttgacagtcgcagagtggcatttcgaattgccaggacagatgcagtggaggttccaacagaaagtgatatacaggcgatttatgaattagcgaaaggctaaggaggattttgaacgcagaataagcattcccccgcttcaagtgcgtagagcactaagcggtgggtaaaggggatgcttatgtcagtgggagttaaaagctcccactgacaggtcgcaaagcgactgcgtt

SEQ ID NO: 13386 - DNA, 304 bp, Unknown
  gut microbiota DNA sequence
gctgttttggggaaaaatagatcgacaagttgcaccgcggaaacaacagttgtccgggcgcaacagcaaccaggcaaaaattaagtcaaaaatgcaaaaaaatatgtaaaaaatagccaaaaaagagaaaatagaattggcatacaaattgcattatatatagacatcagggcaaaggtccacaaaatttccaaacaaaaagaaaggaagaggaaaaatgaagaagaaggcgattagtttattacttgttggggcaatggtggcagctatggttgccggatgtggaaatgcatcatccgataac

SEQ ID NO: 13387 - DNA, 452 bp, Unknown
  gut microbiota DNA sequence
agggaacactgttgaagatgtacgaccaattataggaagaaaaggagaatattttatgcagaacgaaatttatgatgagaaaaatggacttacttatatgttatgtggtgattattatttgccagaattggcacttacagatatcgaaccaacttatgggaaatatgggatgcttcgtaaaagctatttacaggaacacagaaaggcaaaatatcaaatattgttgttacaaggaaaacttgtcgagcatttgaatcagattgatgcagaagcaagggatagagaagaacaattagtaaaacagatgatggagaaagaaggaattacagaggaattaaaaaggcaagacaacatggaatggacaaggaggatgaataccctttgtcatgatgcagaagagatgattttgacggaaatgatatacacgaaaggataatgaactgtattggata

SEQ ID NO: 13388 - DNA, 305 bp, Unknown
  gut microbiota DNA sequence
tattgcaccaaatgccatcccaattattatcattcgaccacattctcttgcagattccaatgcaaatccataactcaaaacacctgtcagaataaatataattgataaaaagtaaagcaaaatatttcccaatatcatcggaatttttaataaccagtgaatcaatgtcattactgcaagaattaaatataaaaacacttttattatgtacttaaccaacatttttaatccctcccttttttatctttccggacagcaagaatcttgccatccggacttccatttttttgctatccggacttcca

SEQ ID NO: 13389 - DNA, 454 bp, Unknown
  gut microbiota DNA sequence
gcaaaattgaaattgggcggaaaaatcaaagtttcttgcgccactccttcttacgaagattatgattattttattacaattccgccataccaattaaatacaaatgcttctattatacattttgattctgaactcgaaagatttgcagacgaaacctttttagagacagctttaccacttaaagaaaatattcctgttaaggatttttgtaatcttaccgaatcactgatactataactttttggttttatcacagagagagttgcttatggctctctctttttttaacgcttcctcctcccatgttctaactcattatggcaaatcattttctaaagcaagtatcgcctagagtaactcaaaatcccatttctggattatgattctctgacgaacttaatggagattacgattccccataccctcaatatcacaaaatatcaaattttgctat

SEQ ID NO: 13390 - DNA, 1332 bp, Unknown
  gut microbiota DNA sequence
atactttatatttgcttatcttcttgctagcagtgaaaccaatcccaatacgattaaaatcgggaatgcaatgtaaagcaatccacctgctactaatgcgattaaaataattggtaaaaatacaatggtgagcacaatttttgaaattccccatgctgctctgattccgaaaacaagcagttttccaaataaaactaacatacagattccaaataataacgttaacataattcctctttctatcaggttcatgcctgatgcataaaattgtatttcaagcttttccttgtcataagcttgctgcctcttgatatttcaagtataatattctttgatatattcgtacataccgatttcggggaaataactacttctatttctccattttagggaattactcttaagttaaaactgctatttgcgaaatattttcttaagaatctcttccagatattccatatccaattttattaccaggaattattgatcagatagcatgaaatcatattttacagaaggacaaaaacattattatgggaaaacaatcaaaacgtgaacataaaacaatttatcagttatgccgcgaagaatgcggacttaccagagacggtgccagtgaattgatggacggtgtttctgccgcccgcattgaaaaatttgaatatgaacttcaggagccaacaccgtatgacattctgcagatggcagactgctacaagcgcccagatctgtgtaactactactgttcacacaaatgcgctatcggcgaccgctatgttccggaagttgagccatcggaattatccagcattattctggaaaccatcgcatctctgaatgacattcagccgcttaccgaccgcctgattcagattacacgggatggcaagatcaccgatgatgagatcaaagattttgcattgatcagtaaaaaattaaatgatatttctctggcagtagatgccttaaatctctgggtagacaaaaccaccagcgaaaataatatcaatatcaaactgctcaatgaggaaatgcaaaagttaaatcagtgatctgccggaatccacttacggtaagtatccggtgtcatcccttgatgtttacgaaacacgcttccaaaatagctgggactttcaaaaccacatttttttgaaatctcagctattgttttgtccggaaaacgattcaacaatacgcaggcattcataatccgaatatcacacagcacctgcatgatggtcttgttcatccgctttttaaagtaggaacacatatactctttgctcagacttgtcagttcactcaattcttccagtgtaattccacgataaa

SEQ ID NO: 13391 - DNA, 1230 bp, Unknown
  gut microbiota DNA sequence
aaatctgctcgtcgtgcaccacagttctctaaacgataattttctcggaagagatttttcaaaagagtttatatcccggaagtacattgcttccgggattttttctatttggtcaaaacatgaccagaaatctttaattctgtaattcaattaattagattatgagaaaaatgtctgatttattctgaataaatcgtgaaatgcaacttacccgctgatttttacaatttacagtttccagtatagatatggaaaacattctatgctatattattatttcagaaccatcatcatatttttgtgtattctgttgttgcgggatggtgtaatagtgctgtattctgtagcgagcattataacagggttaatcgcatgggcaataccaattatagatagagtatttttgaaaacgtatcatgctgaaaggtcgatgttagtaagtgttggattcgcatttttgtctgtgtggatacagttttttgatataaaaaatttgacatatactggtaattggtcagcaatccatgatacaattaatagcttatcagcggttgtaattatattttgtatcattacattggtgttgaattttataaatatcaggaaaaagtatgcttaaataaagtataaaatcattacggagggaaaaaacatgtttcgagaaatgcgtagattcaaacaggtcttaagccaggaagaatgtatagaagtattaaaaaatgaaccgcgaggagtattatctttaatcggggaggatggatatccatacggaatcccgatggatcactggtattgtgaggaagatggaaaactttattttcactgtgcaaaagaagggcacaaactggatgcattgaaagcttgcagtaaagcgtcttattgtgtttatgatcagggatatcacaaagaaggcgagtgggcgttgaacattcgcagtgtagtggtttttgggcagatcagcgttgtggaagaggcagagaagacaaaatatatttgcacaaatctgtgtcgaaaatttacggatgatgccgcttatctggaacatgaactgacacattccctggtgcgcgtgctttgtctggagttgagccctgagcatatgaccggcaaactggtgaacgaatcataaaaagcaaagataataaaataaatcaccctgaaattgcgtgtggagcaaacttcaaataatttatcgaattcatctcagtctgagttgagactcccacttct

SEQ ID NO: 13392 - DNA, 23577 bp, Unknown
  gut microbiota DNA sequence
aaaatcacccgatttagagacgattatgcaaaaaatagcggtgaatattacaaaaatatgagaaatcacttgcccccgcatggaatgcgggggtattatagcttatgtgagaaataaatgtttcagtaaatgaattttacggaggaagttagaatatgacaaaagtaattatgaacggatgtaacggacatatgggacaggtgatcagtgatctgtgtgagaaagatccggagattgagatcgtagcaggagtagatatcaatacagagcagcactatggatatccggtgtttgcaaatattgctgactgtgacgtagaggcagaggcgattattgatttttctcatgtcagctgcattgatgcactgatgaactacagtgtagagcgtcagattccggtagttgtttgtactacaggactttccgcagagcaggatgcattattaaaatcatccagcgagaaagttgcagttttaaaatcagcgaatatgtctctgggcgttaataccttaatggaacttcttcagaccgcagcaaaagtactggctccggcaggatttgacatggagatcgtggagaaacatcacaaccagaaactggatgcaccgagcggaaccgcaatcgcactggcagattccatgaatgaagcgttggatgaggcatattcttacaaatatgaccgttcccaggagcgtaaaaaacgtgacaaatacgagatcggtattcaggcagtccgtggcggcaacatcgttggcgagcatgaagtgatctttgcaggaacagatgaagtcattacattcaaacatactgcatattccaaagcaatctttggtaagggagccattgaagctgcaaaatatctggcaggaaaaccggctggattttacggaatggcagatgtgatcaagagcgcatcataaaatgagcgtattttatgcgtgaaggatgattcagcgtgcgagcgttgcaattttgcgtggaagcatcgacttgtatcgaaatcagaaaacttaaatcaagtggttagaataatataagggggattaccagacatggaaaatgcagatattaagtatctgaaagtactggcaacacaatatccgaacattgcagcggcggcgacggagattgtcaatctgaaggcaattttaagtctgccaaaggccaccgagcacttcatcacggacgttcatggggagtacgaacagttccgtcatgtgatgtgcaacggttccggtgccgtacagcgtaagatcgaggatgaatttggaagttctctgggcattccggagaaacgtacactggcaacactgatctattatccggaactgaagatcaaacagattgaaggaaaattaacggcacgggaaaatctggaggactggtataaggtgacaattttccgcctgatccgtgtttgtaaaaatgcgtcatccaagtatacccgttctaaagtgcgaaaatccttgccgaaggattttgcatatattatcgaggagctgatgaccggaagaccggatgtggcagatcaggaagcctattataatgaaatcatcaattctgttatccacaccggcagggcagcacagctgattgcagatttctgctatttgatccgtcgttttactgtggatcatttgcatgtagttggtgatatttttgacagaggaccgtatccgcatctgatcatggatgatctgatgaaacatcattctgtggatattcagtggggaaaccatgatattctctggatgggagcggcagcaggttctgtagcatgtatgtgtaatatgcttcgtatttcagcgcgatatggtaatctgtcgattctggaagatgcctatggtatcaatatgattccactgatgcgtctggcaatggattgttatcagggacacacaagtaagacatttaatgttcatgtgcgggatgatgacgaagaatatgaccgcgattttgcggagctggatgccatgatgcacaaagctatcaccatcattcagtttaaggcagagggacagctgatcaaagagcatccggaatgggatatgcaggagcgcctgctgttggataagattgattatgaaaaaggtacgatcaaattaaacggcaaagaatatacgttgaacgatacgtatttcccgaccatcgatccaaaggaaccgtacaaatttacccagcaggaagaagatgtagtagagcgtctgaaaaacagttttcttggcagtgagcgtctgcagcgccatatccgtttcctgtatacaaaaggaagtctttacaaagtatacaatggaaacctgttgtatcatggctgcgttccgttgaatgatgacggcagctttatgaaagtcaatatttatggaaagacttacagtggaaaggctctgtatgatattttagagcattatgccagaaaaggttactattccattgatccggtggagaagaaacgcggcgaggatattctctggtttatctggaaaaacaaacattcaccggtattcggaaaagagcgtatggcaacctttgagcgttattttattaatgaaaaggaaactcatgaggaaccgaaaaatgcgtattaccgtctgtttgagaaggaagagatcgtggataagatcctgaaagaatttggacttccggtacagggtgcgcatatcatcaatggtcatattccggtgattgtaaaaaaaggtgaatctccggtaaaatgtggcggcaaactgcttgtcattgacggtggattttccaaggcttatcagcagaagaccggaattgcgggttacacactgatctacaactcttatggactggtgctggcagcacatgaaccatttacttccatggaagatacggtgttgaatgagacatgtatccattctcatatcgttatggaacagaacgtggtaaaacggaaaacagtaaatgataccgacactggtaaagttctgcgggaaaatatcgaggagctggaagaattactggaggcttatcgaagcggtatgctggtagagaagttttgatcttaatgaatgagagaagatttctggtttgacagaaggaaatcagctaaataatagctatgttatgaagtaattctttgtaaggtcagcggaatgatttttgaaaaataggaaaatttagatgcaaaagaggaacaattgagttcttgatgataggaatggtgtattggaacagttaccattttagaattatttaagaattgattgttcctctttttattgacaataatacttaacagtgttaatatttaccaaaagtcaatgattaacactgttaaatattgggaaaataagagtatctcacctgttatatactgcgttgtatgaggaaaacaggaggtatctttcaaaagatatgtatacggaaaggaggaagctttcgggagttatgaaatacgttgaaaataggaaagaagtgcttgaccgggaaataacgggttctgtagatcgcaggagcgaaacagagtccatggagcatgaggaacacatgcagtatagagaatgcatggatcatatggagcagaatgtttgggaagccctgcatatgtttcggaaactgaatatcggaagcattctgccgcgtctgaacaaaggggaatttgtgctgatgaacggcatttatcatgtgcagaagaaaattggttctgaacatggggtgaagatgtcggatctggcgaaatatacccacgcgctgccaccggcggtatccagaagcattaaagcattggagaaaaagagatacgttagacgttttgtggatcagaacgaccgcaggaatacattggtggagatcaccgaatccggtcaggaagttttgcaggaatccaatgccattatggatgaatttatccaccgggtgtttgaaaagacagataaggaagagatggcgcggctggtgagttatatttatcagcaatatgagctggcaaaagaagaactggagaagatccgggagagccagaaaaaggcaaaagaagctacagatgaagaagcttaatgaagtcaatcatatcggatggatctacatgctggttaaataaaatagccggtaatagaatcaatctgaattttgggaaagcataaaatagtagttagaaaggaaatcacggaaatgaagaagatttttaaaaatatgcttccgtactggaaatcgatcattctgatcgtggtggtgcttgtaatccaggcgtactgtgatctggcgttgccgacatataccgcagatatcattgatgtgggtattcagaataagggaatcgaacatattcttccacaggaaatgacgtcagaagagtatgagaatgcacagctttttatgacgaaagaagaaaagacgttatgggcttccagttatgaggcaacgcagcataagacctatgaatgttctgtaacagacaaagataccctggatgagctggattccgaatttgcgattccactgattctgaattatcagatgtctcagatggaagaagaccagttcaaagaaatgctggcaacacagaacgggcaggacgtatctggatacgaacagatgagtctggagcagatcgggcagatgcttggcacagaactgagtgtatcagaaaaagaagttgagcaggacgacggaagcacacagaccgtcaactgcgtggatgtacgtccgatttttgaggcaatggaggcatccggacagatggacgaaagtgctgttttatccatgcgtgattccatggaagatatggtggaaaccatgggcgactccatgcttacttctaccggagcagcgtacgcggcagcctgtgacgaggatgcaggtctggatctggcaaaaattcagaccgcatatctttggaaaaaaggattgcagatggcagggcttgccgcagtcatgatggccgcagcaatttttgtttcttatctggcttccaaggtcggagcaggtgtgggacgttctctgcgtggcagactgtatgaaaaagttatgcatttttctaatgcggagatggagcatttttctactgcgtcattgatcaccagaagtacgaatgacgtacagcagattcagatggtgacagcggtatttttacgaatgcttgcttatgcaccgatcatcggaatcggcggtatcattaaagtggtacagacaaaagccggaatgggatggctgatcgtagtggcggttatcgtaatttttgcatttgtcatgatcctgatgggtgcggcaatgccgaaattcaagaaaatgcaggagaaagtcgacgatgtcaaccttgtttccagagagattttgaccggtctttctgttatccgtgctttccgtcgtgaggacaaagaggaagaacgttttgacggcgtgaaccgcgaactgaccaagaccatgctttttactaaccgtgttatgacattaatgatgcctggtatgatgatgatcatgtatgcactgacggttgcaatcgtctgggtggcagcaaagaaaatcgaccttggcgtaatgcaggttggttctatgactgcatttatcacttacgcaatgctgatcgttatggcatttttgatgctgactgcaatgtctgtcatgcttccgcgtgccggtgtggcagcagaccgtatcgatgaagtattaaatatggatatttctatcaaagaagcagaagaaccgaaacatgttgagaaaacagcaggtgtcttgaaattttcacatgttgatttcacgtatccgggaagcaaagaagccgcgattacggatattgattttacggcgaacccgggacagaccacagctatcatcggaagtaccggctgcggtaagtcaaccatcgtaaacctgattccgcgtctgtacgatgtgacagagggaagcattacgctggatggcaccgatatccgggagctttccatgaaagatctgcgtcagcagattggctttgtaccgcagaaaggtgtgctgttctccggaaccattgcatccaacctgcgttttggtaataaggacgccagcgatgtagatgtgcgtcaggcggctcagatcgcccaggcggaagattttattgaagaaaaatctgagaaatacgatgcaccgatcgcacagggcggaacaaacgtttccggtggacagaaacagcgtcttgccattgcccgtgccattgcaaaacatccgaagatctttgtgtttgacgacagtttttccgcactggatctgaaaacggatgcaaaactgagaaaagcactgtcaaataccgttcaggacagcacggtgatcattgtggcacagcgtatcagcacaattttacatgcagatcagattcttgttctggatgaaggacagatcgtgggtaaaggtactcatgaggaactgatgaaaacctgtacggtatatcaggagattgcaaaatctcagatgtctgcaaaagaacttggactgacagacggagaggaggcagaagatcatgagtaatgagagaaatacacattccgcttccagacaaagacgtccgatgggaccgggcagaggaatggcaccgggagaaaaggcaaaagatctcaaaggagcaatcggaaaaatgctccgctatattggaaaatataaaatagccgttgtgtttgttatgatcattgcggcctgctccaccgtattcagtgtcgtaggaccgaaagtacttggtaaggcaaccacagcgctggcaagcggtctgatggcaaaagtagccggaaccggcggcattgattttacttatatcggaaaaatcctgctttttgtgcttggtttatacctgctcagctctgtcttaagttttctgcagggatggatcatgaccggtatcacacagaaaatctgttaccggatgcgaaaagagattacggaaaaaatcaaccgcatgccgatgaaatattttgagagccgtacttacggtgaggtgttatccagaatcaccaacgatgtggatacccttggcatgggcttaaaccagagtgtgacccagatcattacatccacagcaacgatcatcggtgtgcttgtaatgatgctcagcatctctccgctgatgacgctgatcgcgctggttgtgcttccggtttccggactttgcgtgtcactggtggtaaaaaaatcacagaaacactttatcacacagcaggaataccttggacatatcaatggtcaggtagaggaaagctatggcggtcatctggtgatcaaagcttataataaagaagacgagatgattgctcagttcaaccagaccaatgacgtattgtatacttctgcatggaaatcccagttcctctccggaatcatgatgccgatcatgcagtttatcggaaaccttggttatgcggcagttgcactcagcggcggtatgctggcaatccgtggaattattaccattggcgatattcaggcgtttatccagtatgtgaagagtttcacacagccgatccagcagatcgcacaggtaacaaatcaggtgcagtccatggcagcagcggcagagcgtgtgtttgaattcctggaagaagaggaagaagatcagatcgtggagcagcctgcagatgtgacaaaagtagtcggaaacgtagaatttgagcacgtaagctttggttacaatccggatcagatgatcatccatgatttcagtgcaaaggcagaagccggacagaagattgctatcgttggaccaacaggtgcaggtaagacgacgatggtaaaattgctgatgcgtttctatgatgtgaatagtggttccattcgcattgatggtcacgatatccgcgatttcaaccgccgggagctgagagatgcgtttggaatggtattgcaggatacctggctctttaagggaagcattatggaaaatatccgttacggacgtctggatgctaccgatgaggaagtcattgaagcggcaaaggcagcacatgcggatcactttatccggacactgccgggtggctatgacatggagctgaatgaggatgcaagcaatatttctcagggacagaagcagctgctgaccatcgcgagagcgattttggcagataaccgtattctgattctggatgaggcaacgtcttctgttgatacaagaacggaggaactgattcagagtgcgatggataatctgatgaagggacgaaccagttttgtcattgcgcatcggttgtctacgatcaaaaatgcggatatgattcttgtgatgaaagatggagatatcattgagcagggtgatcatgcggaattgctggcgaagggtggattttatgcggatctgtataatagccagttctccgagtagaagtatttgttaaaatttaatatgtgaaaacaaaatcagagaaagtttcctcactcactagccattcactaccttcgttttgcttcggttttatcgcgctcacttccaactccgataaaagccggtcgttttccgttcgcgcaaaacttgcaaaactcagtcgttcactgaatcgttcgtcgaggaaactttctctgattttgctatttcagttgtgtaaatggaagaaattcaagtcgaacgcacgtgagacttggtgcgtgattctggtcagcgaaagctgacatattcttctcagaatcactgcacatctacacatccaaagacaagacggtaggacaattttcgttatcgaagtgagcatagcccgactgcgggagtgtgtttgagccaacagctgtttttgctgttggtgagttcacgggagcagtcggagataagcggcgcaacgaagatagaaaactgttcgtgtctgtcttggatgtttttgttttcttccttacttaagtacgcgaacgataatatttcgtggtgtgttgccgatacagcatcagcaatccgcggacgcaaagttcaatggacattgcaatccacattccggtaagtccaaggcgtttgaccagaattaatgccagaccgatacgcacgatccagatgctgccgaggttcatcagacttggcacgaaggtatcgccggttccacgcagtgctccggcagctacgatggacactccgaaaagcggttcggaaagcagctcaattctcagaacatgaacagccatggcctgtacggttgtatcgggtgtcagaagccggaaaacgaacgggcaggcaaacatcatgaccgcaccggtgcagcccataaaaatcgcgcccatggcggtactgatattgccatatcgtttggcagtttttaactctccggcaccgatgcttcgcccaacgagtgttgttgctgccatgccgagaccatatcctggcatgtagcagagactttctgcggtgaccgcgaaggagttggcagcgatggcggcagcacccagtggcgcaatgattctggtggacatgaccatggcaccgttcatggcgatttcctgtaccgccacaggcattccaatctggaatgccttttttagaatattgcggtcaaaaggatgcttatcggtacgtctgatccgcagccgcttattggaaatacagcagcgccatgccatgatcagactgatcacggcgcaggccagcgctgttcccatacctgcaccgagaacgccgaaatgcggaatcagcagagcattgaacacaacgtccagcccacacatgacggcattcaaaatacttggtgttaccatatcaccgcagcattgtaaaaaggacgatgccagggagttcaactgtgaaaacgggatcatcagcgagtacacgaaaaagtatgcagttgcatccgggcagattgcaggatcgccacccaatgcgatcggcagcggatgactgagcagaagaccgcttaaacacaaaagtccggaaataatcagggcactgatcagaccgtgccggacgacatttcgggcttccatatcctgatttgctccgatgtgatgcgccacctgcaccgaaaatccggcagaaactgcggatagcacgccgttgtacagccaggtcatggcaacgaccagaccgatggcagcagaagcggcagcgcccagagcaccgaccatggcagagtcaatgtactgcatggcgatggtggtgatctgcgttaaaatcgcgggcagacttaattgccagacttgtttgacttctggctttaattccgcccagttaaaagttcttttccccatgtatgttatactccctttatcgtttaatttttttaaaagtgcatgatttaaaatttaggttgtgaaaaaggactctgcgattttgtctcatccgctaacaatcgctggccgagacaaaatagccagagtcctttcatttacgttacaaagtcatgctgtacgattattaaatgaacatatcccacatgattgtagacgtttttttgtttcaatagttacacaatggattcttgcggtatcatattgagaaaatttttgaatattactatagatgcattttcatctcagtctgagatgagactcccacttctgcaagtggtgagtagtaacaagtatttctcagtgggagttcaatctccgactgagataaatgctccgcgagggcgcacattgtctggaagacaatggttttgcgccgaccggaacggagtgtagagtgcagtgattctgaaaagaagatgtcagcttgcgctgaccagaatcacgcaccaagtctcacgtgcgttcgacttgaatgtgtaaatgacgaaatcgaagacttcttctgcgacaagcgattaagtaagcgactgagtctcacaagtttttgcgcgaacgggaaccgaccagcttttataggaggtgggagtgagcgcgatgaaaacgaagtgagatgagggtagcgcacgtctagcggttgcagaagaagtcttcgatttcgctttaaaatatttaattttattataagcctaaagaagctgaattccagcctctttcagttttgcttccatttcttccggccacagagagcactgtacctctccgatatgtgctttacgcaggaagaacatacagatacgggactgtccgattccaccacccatagtgtatggaagttttttctccagaattgctttctggaacggaagttctgcacgctccaggcagccggctttgtcaagctgctctttcagggatacttcgtctacacggatacccatggaagaaagttccagtgcgatgtcaagtaccggatagtaaacaacgatatctgcatttagagcccagtcatcgtaatccggagcacgaccgtcgtgcggttcgccgcattccagtttatcaccgatctgcataatgcagacagcaccttttgcctgtgcgatataatattcacgttccttcggagtgttgtccgggaacatttcttccagttcgcgtgttgttacaaagaaaatatcttttggtaagatttcatggatgtaatcatactgaatggtcatgtatttttctgtcttgcgcagtactttgtaaacctgacgaacagtttcttttaatgtatccagatttctctgagatttttcaataactttttcccagtcccactgatcaacgaaaatggaatgaatgttgtctgtcacttcatcgcggcggatggcattcatatcagtgtaaagtccggagccgacttcaaaatcgtatttgtctaatgcgtaacgtttccattttgccagagaatgtacaacttctccgatgcgtccgttctgctctgcaatgtcaaagcttaccgggcgctccacaccgtttaagttgtcgttcaatccggaagccggatctacaaaaagtggtgcagatacacgggcaaggttcaattcctgagccagacgtgtctgaaagaaatcctttactgtcttgatcgcaatctgtgtatcgtgcagattgaggtcagatttataaccttttggaatagtgatggtacccataaaaatctcctctattacttttttatatctgttcataatcattcagtgtcaggaaattaacggattaattcactgattctggatggttataaagtgacgcgtgtcatttgctgagcacaaattatgctttttatgattcagccattgtttattatagcatctaagtgtgatttttcaagatttgatacttatttcacatagaaaaatgcaaaaaaacatatagtatatgcaggaagttgattttttatgaaggggagaaacatttggtgaggatgtatgatgaataaaaaattgctattacgtggtcggtggcatataataaaaggacactcagcaaaaaagagggaggcacggaatggatagaaaacgactggatcagcagtttgattttataaaagagattgataaggaaaagtttattcagcggcagacgagattgtcggacaatgtgcgtcgggaaaatgacgcggaacatgcatggcatatggcaatcatgacggtacttttgtcagaatacgccaatgaaaaaattgatgtgttgcggacggttaccatgcttttgatccacgatattgtggagatcgatgcgggagatacctatgcgtatgacgaagaaggattgaaaacacagcgcgagagggaatgtcaggcggcagatcgtatctatgcgctgcttccagaggatcagcagagcaaactgcgggacatttgggaagaatttgaggcaggagaaacgccggaggcaaaatttgcacatacgatggacaacctgcagccggctatgctgaatgtggtaaacaatggtgtttcatggaaagaacatggcatcgctataagtcagatcatgaagcgtaatgctcacaccgccgaaggttcacaggttttatgggactatgcctatgagaatttttttaagaaaaatattgatgatggaaatattattgatgacggtaagaaaaaatccgggtacgcataaaaagttcagtttccggaaagtataaacatatattttatacgaatctggaggaaacggctatgaacagacagaaagcggcaatcatcggctgtggatttgtgggatcatccacggcatttgcattgatgcagaaaggacttttttcggaactggtgcttattgatgcggatcagaaaaaagcgcatggcgaggcggcagatattgcccatggacgaccttttgcgcatatgatgcagatctatgcaggagattattcggatgtaggagactgtggactgatcattattacggcgggagcggcgcagaaacccggtgagagccgaacagcactggtgtacaaaaatgtggaaatatttaaaaacattattccacagatcacggctcagaattttgaaggaattttactgattgtcagcaatccggtggatattctgacctatgcggcatggaagatttctggttatccgaaggagcgggtaattggaagtggaacggtactggattccgcgcgttttcgctatctgctcagtgaacatctgcaggtggattctgccagtgtgcatgccatgatcatcggggagcatggagacagtgagcttgctgtgtggagtggtgccaatgtatcgggaattccaatccacgatttttgtgagattcgtgggcactatgatcatgaacaggcaatggaacagatttatcgcagggtgcgtgaaagtgcgtatcagattattgaagaaaaaggtgccacttattatggtgttgccatggcggtgacgcggattgtggtggcactgattcgagacgagggcgcagttttaccgatttccagtttgatgcagggagaatatggattgtcggatctgtgtatcagtgtaccggcgatcgttggaggaaacggcgtgcagcaggtgctggagattccgttaaatgaaaaggaacatacggaactccttcattctgcaaatgaattgaaagaaatcctgcagaaaatttggttataggaagataaaaatggagaatttaaaagaaaaattggcacagcatgagccgacttttatcggcatggatcaatgtcatcaggcagcagtttgtatcccattattgaaaaatacaaacggtggatatgatgtactgtttgaagtacgtgcggccactatagcacatcagccgggagacgtctgtctgcccggcggtatggtggaagatggcgaggaaccgcgggaagcggtattacgtgaattgcaggaagaattattattgagcgaagaacagattcattatctgggagacatggacaaactttataccggaagcagtctgatcatgtattcctttgccgcggaagtaacagaatatcagaatacgttcagtccggcagaggtgggtgaggtgtttcgggttccgttggagttctttttacatacggagccaaaatgctatgtcacccgggcaagggtggaacccggagaggatttcccttatgatttgatctgtggcggtcgtgagtataattggagaagccggaaggaagatgtttgtttttatcagtatgaaggacatgtaatctggggacttacagcaaaagtaatccgagcttttgcagaggtggtaagaagctgacatgagagcgtagaataattattacttaagaaaataagtctgtgtacttgcagtatatgggggcacaggcttatttttctgtgaaaaatacatacaaacggagagaaaaaagccctataaatttctgccttgtcagttgaaaaaaaaatacgcacatagtatacttattttatatctgtgttgagtttttattattaaaaaatttacagttaaaatacagatctgaaaaaaaggaaaatccaagaaatggcttaaaataaggaggaaacaatagaatggaagcttataaacaggagtttatcgagtttatggtagaaagtgatgttttaaaatttggagagtttaccctgaaaagcggcagaaaatctccattttttatgaacgcaggagcttatgtgacaggttcccagttaaagagacttggtgagtattatgcaaaggcaattcatgataaatacggggatgatttcgatgtattgttcggaccggcttataaaggaatcccgatcagcgttgtaacagctattgcatacagcgagttatacggaaaagaggttcgttactgctcagatcgtaaagaaacaaaagatcacggcgcagacaaaggaaaattccttggaagtactttgaaagacggcgatcgtgtcgttatgatcgaggatgttaccacttccggaaaatccatggaagagacggttccgaaggtacgtgaagctgcaaacgtagaaatcgttggtctgatggtttctctggatcgtatggaagttggaaaaggcggcaagaaatgcgctcttgaggaagtaaaagatctgtacggtttcgagacaaatgctatcgtaactatggcagaggtggttgagcatctgtacaaccgtgagtgcaatggcaaagtggtcatcgatgatacattaaaagctgccattgacgcatattatgagcagtatggcgcaaaataagcattgcggcaatgtttataaataatcataaaaaacaaattcgacttttatgcagagtattgtttgcgctgtatatcgccggtctggtgtacttcctgttttttgcggatatgctggaccgggtcggaattgagcgcagttatcattacaatgtgattccgttcagggagatccggagatttattgtatatgcggatcttctgggaccggtggcagtgatttccaatttatttgggaatattgccatttttatgccatttggttttttggtcccgatcctgggcagaaaaaaacggaaattctggttcacagcactggcgagttttgaactgagtctgagtgtggaatgcattcagcttgtaaccaaaaccggctgctttgatgtggacgatattttcctgaatacaatcggtggaatgttggggtatctggtctatgcgctggtgcagcgcaagcgggaccgggatgccgatgccagaaggctgaaagagcaaaaacattaaggaggcaacgtatggcaagcagcagaagagaatattttcgccggacacgaaagacccggatgagggatttaaaaaattcccctaccgggattttgtctttttgtacagcaatggcggcgctggcggtattttgtaccgcggtgatccagtcgtttctggcatccggtgaaggtggatataaagtaggtggtctgggattaattggattgatcctggcacttggcgcattgatctgtggaatttttgcagtgaaggagccaaaaatcagaccattgcccccaagacttggcattgtgtttggcgcagtgctgaccgttggacttggcggcatgtacatatacggtttgatgtaaatcatgattcagcgcaaaagaaacacattatttgaacgcagaataagcattccccagcttcaagtgcgtggagcactaagcggtgggtaaggggggatgcttatgtcagtgggagttaaaagctcccactgacaggtcgcaaagtgactgcgttcatgagcaagcagcgaaagcggattgcgaatgtccgctttactttagggtaagtaaatacttgagggaaaaagaaatgaaatatgattcagttcagaagtttaacagtgtagagaattacattctgcaaatgcgtccaattttgagaaagagagcgttgttctcagacggaacgtcagattatcggattccgccggagccgaaggcgggagagcatgtgaaactccgttttcgtacggcggcagacaatgtagatctagttgtgctctgtcacgaggacgagcggatcgagatgcagatcgcagatcgggaaagtgattttgattattatgaagctgaggttcaggttggaaatgagccttataagtatcattttgaaattgtttccggtatgcttcgctgtagttatgaccgggcaggtgttgcacgggaataccgcccgcagtatgaattttgtatcatcccgggattttcaacaccggagtggtcaaaaggtgcggttatgtatcagatttttacagaccgcttctataatggagacaaatccaatgatgtaaagagcggcgaatattactatattaaccgccagacaaagcaggtagagaactgggacaaatgtccggaagattttgatgtggcaaatttctacggcggtgatctgcagggtgttttagacaagatggactatctggaagaactgggcgtggaagttatctacttcaatccgctgtttgtatccgcttccagccacaaatacgatacacaggattatgactatatcgatccgcattttggtgtgatcgtagaggacggtggtgagccgctgccggaatggtgtaacgataattcacaggcgtctctttacaaagcgcgtgtgacgaataaaaagaatctggaagccagcaatgagctgtttatcaagctggtggaggaagcacatagccgtggcatgcgtgtgatcctggatggtgtgttcaatcactgcggttcctttaataaatggctggatcgtgaaaaaatttatgacgatgccgcagattttgagccgggtgcgtttgcgacaaaagacagtccgtatcacagttatttccatttccagaatgacgatgcttttccgaataatgtgacgtatgaaggctggtggggacacaatactctgccaaagctgaattatgaggaatctccggaattagaagcctatgtactgggtgttgcgaaaaaatgggtttctccgccgtataatgccgatggatggcgtctggatgtggcagcggatctgggacacagtcaggaatacaatcaccagttctggaagaaatttcgaaaagcagtcaaagaggcaaatccggaggcattgatccttgcagaacattacggagatccgaaggaatggctgcggggggatcagtgggacagcgttatgaactatgatgcgttcatggaaccgctgacctggtttttgaccggtatggaaaaacatagtgacgaatacaaagattacatgttaggtaatattgaaaattttgaaaatgcgatgacacactatatggcaagttttggaacaccgtctttacagtgcgcgatgaatcagctttccaatcacgatcattcccgttttctgacacgtacgaaccacaaagttggtcgtgcagtcaatctgggaacacaggcggcttccgaaggaatcaacagaggtgtcatgaaagaagctgttattgtgcagatgacatggccaggcgcaccgacactgtattatggtgatgaagcaggcttatgtggatttaccgatccggataaccgtcgtacttacccttggggcaaagaagacaaaatgctgattcgtttccatcgtgatatgattcggattcatcgtgaaaatccggcgttttgtaccggttcggtgaagttcctgcatggagaccgaaatattctctgttacacacgtttcaatcgcgaacagcagtttattattgttatcaacaatgatggttataccagaaatgtggaagtaggtgtatgcggagccggagtgccaaaggcctgtaagttgacacagattatgtactccacggaagaaaattattccatggcacctgtcacttatcaggtggaaggaagctacctcagtctgacattgccgaaatattctgcggtaattttacgacatcttacaggagaggactaaaaagacacacataaatcataatgtaatcttacggaaatagttgtatgaaatgaggatatatggtatattttggaaatagacaaaaggaaattgtgacggctgtctgatgcgtagaccggatgtgtttctaacatgccaacgcgagtccaaacaaaccgcatatcctcaagaaatcagaactttattgtaaaaagtgtttgtacatgttacaatgtgagcgcaaagagtcagatgaaatcaaatagtatacatctgccacacaataaaaaataagaataacgtataattacttgcccgtataatacgcagcgctcatgcagcacaacgtgcaaagacgagattaaggaggataatgttatgctggagaacgacttgactaatattgaaatgctgataatgaaatgtatttgggatacccctgaagaacttgccctgtcacaattggtagcaatggtaaatgagcggtttgagaaaagctggaagcctcagactatttctacttatttagcacacctggttcgtaaaggatacctgagtatgcgcagaaagggaaaagtattcctttatcacccggaagtatccgaagaaagttacagatcctctcagatcgatgaactggttaattactggggagatccgggtacaccgacagagttcctgtccgcattatttgtgataggagacagcgaaagtgaatccgacgaggatttagaggacttaagaaaattattggatgagttggattaatttcttcttttttgtaatcattttaaatacggttaccggaacggttgcatatctgttatgcaagctgttgacacggatcgcagagaaagccggtgcaattcgggtgatatatccgatgtaccggcttgtgatgattttctacacgatcccatttggttggatatatatttatatcaaatgcaatcgtgtatatggatcgtacgggattggtgatagttttttcggtactccgatcatattttggattatacagatagctttgatcgtttggctcataggaatggtatgtgtaattgttcgtaagctgaaggatagttatgaagaacgaaaagcacatgagctgaaaatgaaaaataatatgccatttcgtgctgatgaatatcgtgctatgctcagcagaatgtatccacacagaaattggaaaagaacacagttttgtacaaattttctgacgagatcacctgtggtagttggaaaattttccccggttatcataattccggaaagaaagtattcggaatttcagatacaggtgattttgatgcatgaaggaatgcatatcgttcggctggacaatcttgcaaagcaaatatcaagtgttcttatatacataaactggttcaatccatatctgaaatcatatacaaaagaactggatgaatgggcagatattgcttgtgatattagtgtatgtaagcgttttttaggtggaaactctaaagaatattatattgcactaatggcagcaaaaacttccgagcattccgttgttaacccttttgtctcacatctgaataagagtaacgagtctatcaagaggagaatgatgtatatgaaaaaatggaaagacagtagatcgaaaagatttgttagtgcaattttaatggcaactttgattatggggagttctgtaaccgcttttgctgcaagttcacaggttgctggaacgcagaatgatgtataccgggaaacttgtgaatcagaacaaaatgcttcagattttgaatccagtacagaaattcatatgattccagcagatcaggtagatgaagaaaaatggaatgaagcggttgtctatgaggaggatttattagaacctttgactgttcagaagaattttacatggacagttccggcagataattttgcgcggtcagctggttttataaaacagaagggtggtcagattgtagtatcttgttatttgtattctgagttgaatcatcgtgtaggaattcggcgaccggatggttcgcagttgtatgtaataggtacacatcaggttacagcaacatttccgtgtgaaaagacgggaacatattatgtgtacgtagaaaatatgggacgcgttgatatcaaggcttctggttactatatccgctaatcttttacaatcaaaatgaaaagaatctatgatttataatggtttgaaagtatcgttttgatctgacaaaagtgaaataagtatatgtgggagtgtgaagaacaataaaaagtttttcacactcttttcttttttgtgtacttttgcgatctgcatacttcacagctgaacagtaattcgttcattttttgggaaaacacgaaaaaacttgtcgaatcctgtcgacaagatccgggaacctgagaaacttgccgaaaataccttgaaaaacacgactacattgataaaatagttgcaacagaacacggatgagttctgaaaatactacagttagaggagacttgagatggagaagaaagtatcaatcagagatatcgcaaaactgcatgtatcacagcaacttgaacggaaaaaagcaatattattgaatttggaactggatacgtgtatgagagcaggaaaagagtggattccgattccggggatttttacgtgggaagatcgaaaacgttatgagatggatcagaagattatgcttccgaatggtacttttacgaaacaattctctctgccgaattattttcggggagaaaacgcatatgtaacgcgaggcaggcatatacaggagcaggacatgctgacagaaatggaacagattccgggtgtggagccggaatattatggagatggaagcgaatggctggcatttaccagcaattttgaccaggcgttgttacatgcttgctgtaaatgggataaagatgccagagaatggcgtccactgacagaagatgagatacataagccggaaaaagaaggcgatgcggattatcgttacggtgtgatctatatggcaaaggcagatgatgagcgtttttcaggaaaagcagaatgttctccggcctgtcacgtgatgactccggcagggattcttgcagaacgcggtcagcggcagtatacatttgcgatgaggatgcagaaagaagatacgttgcaggaggatgcatgtttcgaccgtctgatctttgaacacacggaggatttttgtagagatgtgtgtgaattaatgaccgggttaaagaaattttaataaattttacagttgtgtttttattgccattggggtatgatattttcatgtatgtagtcactgattgcataaaataagcagttttgcaatcttgttaagtgctgttctttatatatataactttatgtaataagataaagaatgacttgtatagcgggataaacaatagaatgcttaatacgttgcagaagagaaaataaaagtgaagaaaacatggagataagatatggcaaaaggcaagaaaatttccaagaaacagagaagaaagagaaaattaattctgtttatcgttgagattattattttgattattgtagctggtgcgttatatgtttacagcaaattgaacctttttaacagaaaggaactggatcagtccaaagttggaaaaaatgaggtttcaaaagaaacacagcagacgtttgaaggaaatacgaccatcgcgttgtttggtctggataaccgtgatcagggcgtatatgataccggtaacagtgatgttattatggttatgaacattaataatgatacgaaggaagtaagtctggtatctgtatatcgtgatacttacctgaatattgcaggtgaaggagaggaagaaaaattccgtaaagccaatgcggcatattcagcaggtggtgcggagcaggcagttactatgctgaaccgtaatctggatctggatattgacaattacgtggcattcgattttaaatctgttgcggaagcaattgatattcttggtggtgtagagattgatattgaaagtcaggcggagatggattatctgaatgactacatctcatacaccagtgaatatgttggtggaagcgatgagatgatcgatcatcttggaaaacagactctgaatggtgtacaggcagtatcttatgcccgtatccgttatacagcaggtggagatttcaaacgtgcagagcgtcagcgtcgtgttttaaatgaattgatcaagaaagcaaaagatgcaagtttaacggaactgaatgagctggtaagtacaatcttcccggaggtatctaccgatctgacacagaaagacattatcagtatgatgcctgtaatgttgaaatatgatatggcaaacagtggtggtttcccgtatgataagacgacagatacaccaagtaaaaagattggaagtattgtaatcccatgtgatcttgaaagcaatgttattcagttacataagcagctttttggaacagaggattatcaaccgtctgagacagtacagtcttacaatgatacgatcattgatctgacgggtaagacaacgaaagattcagagacagatcagttcagtgatcaggatgatttctttggaaatggaacacagcagaatagcaataattcaggagatggaggagcagacagttctgcaagtgattcacaatgataaaattgtatatttgtcccgaatgtggatggatgcgaaccgtatcccggagggcaaatgtggagtgttttaaatgctccaatgttgaaatggttccagtgaagctggaatatacaaaatatgtgcagatgtctggcgaagaacgtgagaattacgtggaaagttggatgtacatacatagtaaaaagaagaaataatgttatacatgagtctgtggcagttgctacaggctcattttttgaccatatatagctataataagtttagggaagaagtatgtcagtttgaatgcagaataagcattccccagcttcaag

SEQ ID NO: 13393 - DNA, 6937 bp, Unknown
  gut microbiota DNA sequence
tgattttgcaaataaattctgaattattgataaacgctccgcgggggcgcacattgtctgggagacaatggttttgcgccgaccggaacggagtgtagagtgcagtgattctgagaagaatatgtcagctttcgctgaccagaatcacgcaccaagtctcacgtgcgttcgacttgaattttatagcaacaaatagaaaaaatgaaaataataaataaaaaatcagcaggagataaaataatatgggtgacagcgtttggaatgattttttagatgagacaatcgaagaacgatatgaactggtggcagagcgtgtggaggaaatcagcaaagaagctctggtgccggagctttacaaaggatattttacagaggcagcagtttatttgaaaaaaacaatggaactgtgtcagatggcaaaagatggaactttgcagcagcgcagcctggagacttgcaaggcagatcaggagcagttatatcatcatatgctgccggcttattatgaggaaagctatgcgaacccggcttatgcagtagctatttttggcgaaaaagaaggcgagttgttaagttttctgcgtgcagagttggatgtggcgattacctatgcttttgagggaaaactggcagaactgaccttgttactggagcttttcgtgcaggtgtataactgcttcgaagaagaagatgtgcaggaggcaaaacagaccatttactggtatttccatgattacagtgaagtgtttgtggagaaccagatccgggaaatgatcgatccggtggacagcctgtacaaaaatattattatgaaagcagatctgtctgaactcagttatctgtatcagtatggattttatattggaaaaaatgaacttggcattgcagaatttttaaatcagctttccgaggaagaaattcagtccatggcagatacttatacagaaggatatcgcattggatttgagattactggcaaggatatcaagaagaaaaagacagttcagattcattatcagattggatttgagcgcatgatccgtgcagccatccagaattttgaaaaaatcggactgcaggcgaccatcagcagagagccgtcatcttcctttaataaccgtggcggttccaagcgtggtgcttacgcaaccagcgtaaaccgtcagtatgattttgatcataaagaagacaaagcattctattttgataaagcatttgtggagcggcgtctggaagtactgcgtactgtatttgagcagcataaaattcaggcagcagagcatggcggaccggcagttctggaagtctttggtgaggagccgttttcaccggagaaaaaagatgctgcaattcattatcatgaccgtcagcaggagctggttgtttacaatgcatccatgtccggtcagatcacaaatgagtatatcaaaggtgaggagcgcagcttcacgatcattgcttatccgattccggagatcggtgataaatttaaggaaatttttgcagaaacagtggttatcaatactctggattatgcgaaatatcagaaaatgcagcagtgtatcatcgatgtgcttgacactggtacaaaagtacacatcaccggtcgtggcggcaaccgtacggatctgacagtagcacttcatccgctgaccgatccggacaaacagacaatttttgaaaactgtgtggcagatgtcaatattccggttggcgaggtatttacgtcaccggttctggcaggaacaaacggaacgctgcacgtatcagaagtatttttaaacggtctgcagtatcttgatctggaagttgtgttcaaagacggtatgatcgcgagttacaactgcggaaactttgcggatgaggcacagaacaaggcttatatccgtgataatattttgatgcgtcatgaaacattaccgatgggcgagtttgccatcggaacaaatacaaccgcttatcgtatggcaaaagaatatcagatcggagcaaaattgccgatcctgatcgcggaaaagacaggtccgcattttgcagtgggcgatacctgctattctcatgcagaggataccgctgtttacaatccgaatggcaaggagatcattgccagagataatgagaagagtctgcttcgcaaagaggatatgtcaaaggcatactttaactgccatacagatatcaccattccgtatgatgaacttggtgcgattacagtcattcgtccggatggcagcacttcagacattatccgcgacggtttattccaggtggaaggcgcagaagaacttaacgagccgttattaaattattagaaaaacaaatgaaacgaatgatgtatattagtgacacttataaaaaatataacaatatataattggcaaatttgcatgattcaaggtaagatgtaaacagagtagtaagccatcagggtaaatcaattttgctctgatggtgttataaatatttacatgagggatgaaaggagcacatacaaatggctaaagtaggaattgtaatgggcagtgattcagatatgccgatcatggcaaaggcagcagaaattttggataaattcggtatcgattatgagatgcgtatcatctccgcacatcgtgagccggatgtgttttttgactatgcaaaatccgcagaggagaaaggcttcaaagtaattattgccggagcaggtaaagcagctcatctgccgggtatgtgtgcagcaatcttcccgatgccggtaatcggaatcccgatgaagacatctgatctgggcggtgtagattctctgtactccatcgtacagatgccgagcggaattccagttgcaactgtagcgatcaatggtggcgcaaatgctggtattttggcagcaaagattctggctacttctgatccggaacttttagagaaactgaaagcttacacagaggagctgaaatctcaggtagtggaaaaagacgaaaaattacaggaaaccggatataaaaattacgcaaaatagtcagagtaaggatacaatgtttctgttgagtgaagcaggagctatttgattatgagcaagtggattgcaaatatccgcgttgataaaagaacatgaaaatatgtgctgatacataacggaggaattcagaatggattacaaaaaagcaggtgtagatattgaagctggttacaaatcagtagagctgatgaaaaaacatgtaaaggaaaccatgcgtgcagaagttcttggcggacttggcggattttccggagcattttctttaaataagatcaaagagatggaagatccggtattgttatccggcacagatggatgcggtacaaaagtaaaacttgcatttttaatggacaaacatgataccatcggaatcgatgcagttgcaatgtgcgtaaacgatattgcctgcgcaggcggcgagccgctgtttttcctggattatattgcctgcggcaaaaactatccggagaagattgctgagatcgtaaaaggtgtagcagaaggatgtaaacagtccggcgcagcgctgatcggtggtgagacagcagagcatccgggacttatgcctgaggatgaatatgatctggctggttttgcagttggcgtggttgaccgcaaagatatgatcacaggaagcgaggtaaaagacggcgatgtgctgatcggtatggcttctaccggtgtacattccaacggattctctctggttcgtaaagtattccagatggatgaggaaactctgaatacctatcatgaagaacttggaaaaactcttggcgagacattattagctccgacaagaatttatgtaaatgcattaaaatccatccgtgaagctggcgtgacagtcaaagcatgcagccacatcacaggcggcggattctatgagaacattccgcgtatgctcatcgacggtaaacgtgcggtagtagagaaagacagctacccggtaccaccaatttttgcaatgcttgcaaaagaaggcgacatttccgaagaaatgatgtacaacaccttcaatatgggacttggcatgatcgttgctgtagatccggcagacgttgacaagaccatggaagcaatcaaacaggcaggcgatacaccatatgttgtaggaaagatcattgatggtgaaaaaggagtagatttatgctaagaattgcagtgctggtatccggcggcggtacgaatctgcaggcgatcattgatgccatcgcagatggaaaaatcacaaacaccgagatcgcaacggtcatcagcaataacaaaaatgcctatgcgctggagcgtgccgcaaaggcaggtatcccaaaccgctgcatctctccgaaagattatgaggacagagcacagtttcatgaggcactgttagcagtattggatgaggcgcaggtagatctgatcgttttggcaggatttctggtagtcatcccggagatgatgatccagaaatacagaaaccgcatcatcaacattcatccatctctgattccgtctttctgcggaaccggatattatggtttgaaagtgcatgaaggcgtgttaaaccgtggcgtaaaagtaacgggagcaacctgtcattttgtagatgagggaactgataccggtccaattattttacagaaagccgttgacgtaaaaaatggtgacacaccgaagattttacagcagcgtgtcatggaagaggcagaatggatcattatgccgaaagccattgatctgatcgcaaacggcaaggttaaagttgttgacggaaaagcaatcgtagaagaataatatacataggaataaaagctgacggatgtctgaaataccttgtaaaaaaggtaacagcgttcgtcagcttatatggacttttgatatatcaaacgtaagatgactctcagatctataaagcgtgaataacaaagagattgagagcattcttgagaaaacacagagaatgtaaaaaggagaactgacatgaaagtactgatcgtaggaagtggcggaagagagcatgccatcgcaacaagtgtggcaaaaagcagtcgtgtagataaaatttactgtgcaccgggcaatgccggaatcggacagatcgcagagtgtgtaccgatcggtgctatggaatttgacaaactggttgcatttgcaaaagaaaaccagatcgacctgaccatcatcggcatggacgatccgttggttggcggcgtggtagatgcttttgaggcagagggacttcgcgtctttggaccgaacaaagcagcagcaattctggaaggttccaaagcattttccaaagatttaatgaaaaaatacaatattccaactgcagcatatgagaattttgacgatcctcagaaagcactggaatatctgaaaacagcaaaaatgccgatcgttctgaaagcagacggattggcacttggaaaaggcgtgctgatctgcaatactttagaggaagcagaagctggcgtcaaagagatcatgatggataaaaaattcggttctgccggcaaccatatggttatcgaagagtttatgacaggtcgtgaagtatccgtattatctttcgtagacggaaaaaccattaagatcatgtcttccgcacaggatcacaaacgtgcaaaagacggcgaccagggattaaacacaggtggtatgggaactttctcaccaagcccgttctatacaaaagaagtagacgagttctgtaaaaaatatgtgttccaggcaacggtagatgccatggcagcagagggacgtactttcaaaggtatcattttctttggtctgatgctgacagaggatggaccgaaggttctggagtacaatgccagatttggtgatccggaagcacaggttgtccttccacgtatgaaaaatgatgtgattgacgtgatggaagcctgcatcgatggaactttagatcagatcaatctgcagtttgaggacaatgcagcagtttgtgttgttctggcaagtgatggttatccggtttcctatgaaaaaggattcgagatcaaaggtctggagaattttgaaaacaaagatggctattactgtttccatgcaggtagcaagttaaatgaggaaggcaagatcgtgacaaacggcggtcgtgtccttggagttactgccaaaggtgctaccttaaaagaagcccgcgcaaacgcttatgcggcaacagaatggattgatttcgcaaacaaatatatgcgtcatgatatcggtaaagccatcgatgaggcataatttatgaaaaaagcagttatttttgatatggacggtacgttgtgggattctgtggatgaaatcgtggagtcctggaataagacctgtccggaaatgcatattcgcagagaacagctgatcggtctcatgggaaaaaccatggactgtttcgcaaaagaattgttatcagaatataaattggatgaggcgatggagatcattcatgcctgcgagcgggatgagaatgagtatctgagccatgttggcgcaaaactgtacggagatatccgtaaagtgtttgaaactttgcgtgatatgggatatgagatcggtattgtcagcaactgtcaggcaggatacattgaagtatttctggagtattatcatcttggtgatctggtggcagacatcgagtgttatggcaatacgcaacagcagaaagatgcaaatctgaaagcactgattgagcgtaaccactatgagaagtattattatcttggagatacgcagggggattataatgcttgtcggaaagcgggagttccgttcttgtttgcagcttatggttttggaactgtggatgcagatgtaccacaggtagagagtctggagcagttgccggaaataataaaaaatttataagagtttatgtatagcacccgacgggatttttccgccgggtgcttgcggtaaattcatccagaactgacctataaggag

SEQ ID NO: 13394 - DNA, 4409 bp, Unknown
  gut microbiota DNA sequence
gagtgcgctttttatgaccggctatctgacacagaggggagaggcaaatggaaatctgtaccagcttgtaattccaaaccgagaagttcgaaatattatgacagatcgtgtgatgtcattgtttaaagaaaatgtaggaaaagacggagagatggtcaattctttctgtaatgctcttttagcgggagatacagataaggtagaagaattaaagtatgaaatgaattgaaaaaatataaaaaagcactgaaaaccaatgaatttataggtcttcagtgcctttttttgtagtatacaacagaatgataaataatattaagttttgctaaatttcactgagttagcgcatacttatacattaaacattacatgtgccatttctgtaccggatttggttatgaaaatccgatcaatcgctgtttgaattgcctgcttatccgcatgatcttcataaagatttacgaggaaatctgcctctaccagaatttggtaatctaacccatcaatattgctgtaagtatgatgatgtccgatgagatagcagacacgatcaatcaccgcatcagaataagttccacattccgtcagcatctggcgggcagctgccggaccttctttttcctgcaacggtccggtagaacagtgatatttttcttctgcaattttgataccgatgtcatgaagaattgcagcggtttccagaatatgctgcaattcatcggataaatgttctgcgtgtccgatcatggatgcgtaagtatatacttttgtgtaatgctggatgcgggcaggatcgccggaatagtatgccagcatttttctgatcagtgtttcattcatttcaactgtgttgttcatgttatgtgttcacctcaaaaaattcattattcttcaatcagattagtctgttatcccatctacgttcattacatcataatactcattctgagtcatcagatccgaagcattatcaatcagccccagatcgatcattgcctggatcgtgttcgtacaggacttagacagagaaaatgacacttctatggaagaataataatttgtcggtttattattctgaacggcagcatttaccgtatttgccgaagctgttttgtaatcactggaagtacttgacgaatttctggatggcagcatatctgtcaggtattccacatccccaggaacctgtccatagaagtaaaaactgtcatagtaaattgggttatcgtcagtatcatgaatgccaagtcctgccggataattgcctgcaaggatatctgccttgagtgcttcatacagtgtctccgtctgctgctgattcagggtgatgtttccatcatgtccgtattcgtctacatggcttaaggtgccgtttacaaaggtgacatcttcataattgtagcagagcagataacgaagcagatcttcatttccggtttccagtttagaaatttgataagccggtgtggtatcatccttcagtgttgcgtttgttaccggaatttcatagcggcgcataatttttcgtccatttttcagataataggtaagctgaatggaagagatataatcgctttcgctgtaaacaacggaggttgatgtgctggatgctgtggtgtcggacaatgttgcggttgcaaaatcagcacttcgttcttcaggatgattgtattccagataattttgctggtaggaatacggtaaatactcctgcttgtggttcaaaatattctggtggattttctccagaacttcaaaatccgcttcatccgtgtatacatgctcataatcgccgtacatatagatggcagcaatctgatccgtgtccggaattctgcgttcgatacggaaggcatcacctttcagcagaccggttccaatcaggcagagtgcaatgcatgccgcccattcgatccagcgtttccttgaaaagatatgaaaacgtttttttaacagcatttctgaaatgaagaaactcacaaaggagcacggaatcagaaatacaaataatgccgttgtcatatgtgcggtgttgtcaaagagcagactgaaaagcaggaaggagagcccgaagcctccaaccagcgccagcatccagcggaaacacggatgcagccatccaaaggcaaccacatcgctggtacattccaactgacgtttctggtaaaacacgtaagcaaggatcaaaaatacgactgcgataatgcagtacagtccgatcagcaggcttccgcgcatatgaatctgttccagtgcggtaaaatcttcattcatggaccaggtcagggatacgtgatccagcagatacataaatggagaaagtaccgtgtctctggtctctgtcagcctataacttacctgatcaccaaggattcccatgccataacacatggaggaaatgatcagtgtggcaatggatttaattccaatatacagaaaatttcctacaaaatagtaagctgcagcggcaaccgcatgcccagtgagcatacagcagaacaccgcaagagtataaaacagaaaactcatgcctatcatataaagcagccagtacagcagatattccacggacgtaatattattgataatgcagaccagcaggttcaataaaaacgtgactaactgtggaagtagcaggaataaaaatccgctgatataatttgttacaaaaagttcactccgttttaccggaagcgcatgcatcatatagcagcttcgggttgtgaacagataggaaaaaatggtaagggcagccaccagtgccgcgaaaaaaatgacatatggttccaggtttccactgatgcattccagcatggtcattaagcggttagtagctggagtggcagaatagtgatcaactgccggggtattcatataattgcgggtgttcaggaacattcgcacggtcatattgaaaaacagatacgccagataaaccgcccataccggccagaaccgagtcatatttttgaggaatatcgttttattaaaacaggatgtctttgatttcataattctttcctcccatttcgtaaataaaaatttcttccaatgtaagaggaaggatatcgatcagcatcggatgtgtttcctcaaggatcattttggcgcgttccggattgccttttacgatcagtgtgtatacacgaccggtattggacatgtgtaaaatctcaaaatctttcggcagcgtcggcatgccttcctggaatgccacctgaatcttggacacatttccctgcagatcggagagggaacgttccacgataatcttgcccttgtgcataatgcccacatggtcgcagacatcctctaactcacgcagattgtgggaggagatcaggatcgtagttcggctttcgcttgctttggacaaaatgatactccagatctgacggcgcatgacagggtcgagaccgtccatcggctcatccaggatcatcaactctggcatagcacagatggaaagccagaaggccacctgtttttgcatacctttggaaaggcggcggatgctgcgcttggtatcaatatttgggaaaaattcctgtagtcggtcaaataatgcggcatcaaattttttgtaaatgccctgataaaactgtttcatttccagtgtgtttgactgtaaaaaataaaacatgtcatccggaatgtacgtgaatttggcttttgcctctggattgtcatatactggcagaccatcaatgaggatggagccgctgtccgggcggtaaattcccgtgagatgacggattagggtggattttccggcaccgtttggaccgacgagaccgtaaatggttcctttcggaacgtgcaggctcatgtcgtctaaagccatgaagccgttgaaggtttttgtaatatgttctgcctgaatcatgcctgaatcctccttcctgataaggaaaggatgcggttcgtgagatcatttaccggcatggacaggtagagaagctcagacacgatcttatcaaactgtggcagcagttcctgctggcgaaactggttggagtggtccacctcagcaacaaaggtgccttttccggacaacgtatagatgtaaccttcgctttccagttcccgataggcacgctggatcgtattcggattgatcgccagcgaagcagccatatcacggacggaaggcagtttttcatcttttttcaaagcaccgctgaccacaagctgccggacattatcctttatctgctgataaaaggggcgcgtatcgcggtaatttaactgtatcatagaaatctccttatgtgaaaataaacgaatggtgttagctgaatgtcagattgaatatatcggatgaaagttcaagtcgaacgcatgtgagacttggtgcgtgattctggtcagcgaaagctgacatattcttctcagaatcactgcacatc

SEQ ID NO: 13395 - DNA, 2828 bp, Unknown
  gut microbiota DNA sequence
cccatatggcagacagcgtactaaccgtgttaatacagttaatatagcatgcatgcagaggacatacaaggaagaagcgtaaaagaaaatcttaattctttcgaaagaaaaagattggttgtgtataggggagatacgaggacagaggaagaagttatgcgttgcattcttgaacgtaacaagaatatgcagatgtaaaaagagcaggcggttgttcgcctgctcttgtgttatttgtgatagttaatcttctttttccagctctgcaacaatgtcgtttaacatctgaagtacgttgtcctcacctacattgtcaaagtgttcggaaatggattccagtctatcaaaaaaacttggctttctttcgcctgtctgagtgtcgcaggaagaaccacagctgtggcaattacctgtacatccgccaattgtattttctgccatatgaatttacctcctttataatgtgaatcgaatgattctgatgcattcagtatactataatattctctgcgtttctatagaaaaaatatgaattcatagaaaatttataggattgtatgattgcaggcatgaggatttaaaattcaagtcgaacgcacgtgagacttggtgcgtgattctggtcagcgcaagctgacatcttcttttcagaatcactgcacatcctcgcggagcatttatctcagtcggagattgaactcccactgagaaatacttgttactactcaccacttgcagaagtgggagtctcaactcagactgagatgaatgtttggagtaaggatattttttgaatcggctccaagaatgggatggctaaaatagtgaactattttttagtaagaaagcattcctgttcccatatattgaacgtgaaccgtggtgtatttttggttgagaaatagcggaaaaacgagtataataaaacacataattcgggaaaaaatcccgctgtcaaaaaagcactttatttggatagaaaattacgttgaattatttatctgacaaaagtacttcgtgcaaatgatgcatattagcacgagaagaattatgtttcttttggcagagtttgagaaggagtttttaagtatgagagcaagtggtattttacttccggtaagcagtttaccgtcaaaatatggaatcggatgtttttcaaagagtgcctttgaatggattgattttctgcaggagagcggtcagaccttctggcagatcctgccgttgggaccaaccagttacggtgattctccgtatcagtcattttccacctttgcgggaaatccgtactttatttcactggaagaactgatcgaggaagggcttctgacgagagcggaatgtgagtctgcgcagcttggtacgaatccgtcctatgtggactatgagaagcaatatgaaaacagaaatccattgttacataaagcatatgaaaacagcaaaaaacgggaagacgcagagtttctgaaatttgaggaagagcagaaagaatggctgccggattatgcattatttatggcattgaaggacgttcatgacaaacaggcatggaacacctgggagaaagaactgatccagaaagagccggaagttctggcaaaataccgggaagagcttgcagatgagatctgttattacgaatatctgcagtactggtttttaaaacagtggttgaaagtaaaaaaatatgcaaacgagcgtggtatcaagatcattggtgatatcccgatttatgtagccttcgacagcgcggatgcatggatgaatccggaattatttgagtttgacgaagatatgaacccaatcgaagttgctggatgcccgccagacggatttaccgccgatgggcagctctggggcaacccaatctatgactgggaataccataaaaaacagaactttgcatggtggatccgtcgtatcaaacattgcgaagtattgtatgatgtggttcgaattgatcatttccgtggttttgatgagtattacaccattccttacggcatgacaaacgcccgcatcggaaagtggaaaaagggaccgggtatcgcgctttttaaagaagtgaaaaaacatgtgaaaaacattgagatcattgcggaggatcttggctacatgacacagtctgttcgtgatctggtggcagaaaccggttacccgggcatgaaagtactgcagtttgcctttggcggcggcagcgacaacgaatatcttccacacaactatacaccgaactctgtggtatacacaggaacccatgacaatgagactttgatgcagtatctggatggtacacaggatcatgtacgcaaccatatttgggagtacatgaaccgtccgcatgcgtctaatgaggaactttgtgaaaatctgatctggatggcaatgtccagcgttggaaaatattgtatcattccgattcaggattatctgggacttggaaaagaagcccggatgaacttcccgtctactcttggacataactgggagtggcgtgtgcgtaaggagcagctgacacatgatctggcagggtatattgcgcatatgacaggattgtcctatcgttggagaattgatccgccgaaaaaagaagagacggatgaaggcaaagcagaaaaataatagttgatgataaaacagggaaacgtgataaattgcagagaagaatgtagtgtataaaacaaaatgcacctttcgaaaagagcgatatcagtaattgaaaatcatgtttccctgataaaatttagtttagtaaatgaagttatgagaaagaaggattttgtatggagttaaaacgacaaaatcatgaatttccaccggtgtatgat

SEQ ID NO: 13396 - DNA, 1437 bp, Unknown
  gut microbiota DNA sequence
agaccgcaggctactcccggaattccgttctttttatagaaaagcaaatgtgcgatgcagatttttcattccacatcgcacactctatatttcttgtaatttcacttgtcataaaaaattatgtttctttatcgtcgcatcaatgttaagataccgccaaaaaatccatatccaagtgtaatccatccacaaaccagcattagaaatgccagatgtgtcattcccggaatcgtaacaaacagattcaaaatcatcactgctgccagtgagattgccgctacaactaccgtacgcaaaaacagatatatatatttacctgaaattactgtatgtcttcctgctttatttgaaaatgcataaatcttttccatcatgtcatgccctctttctcaatatcaaaaacttttttcttttactattggaatcgtagcatgccaccgtaaaaaccaaagcatattactgtaaattataagtaaaacttttataatcttaccgcacagtatacttcaaaatttacagattatgatataaagaaaagcgccctgcaaaggacgcttttctttcactcacaagtatttattcatttaagaaatggtgctttattcgtggcagtgtgcacagtctacagactggaatttctcatgatcgtacgcaatgccgtttttatcatagtaatcttttactgctgcttttactgcttcctcagcaagtacggaacagtgaatttttgctggtggaagtccatcaagtgcctcaactactgcacggttggagagttccagagcttcatcgatttttttacccttgatcatctctgtagccatggagcttgttgcgatggctgaaccacatccaaatgtattgaattttacatctgtgattgtctggtcatcatcaactttgatatacattctcatgatatcgccgcattttgcatttcctacttcgccgactccgtcagcatcttccattttacctacatttcttggattctgaaaatgatccattaccttttcactatataacatgttttttctctcctttttccaattcatcccaaaccggtgacatatttcttaaataagttacgatcttcggtaattcttctaatacatagtctacttcttcctgtgtgttgtactcagacagggataaacgaagggaaccgtgtgctacttcgtgcggcagtccgattgcaagaagtacatgggacggatctaaggaaccggatgtacaagcagaaccggaggatgctgcaatacctttcatgtcaagcatcagtaacagggactcgccctcgatgccttcgaaacagaagtttacgttacccgggagacgttttgtgcggtctccgtttaatttggaatgcggaattgtcagcaaaccttcgatcagacggtcacgcaatgctgtcattttttctgcattttctttctg

SEQ ID NO: 13397 - DNA, 3853 bp, Unknown
  gut microbiota DNA sequence
cattttttaatgctgctgccatacctacgattgcaggaatgttctctgtgccggcacgtttaccacgctcctgtgcaccaccttcgatgatgttggaaagcaggattccttttcttgcatacaggaaaccaactccttttggtccgtggaatttatgtgcggatgcagacatcatgtcgatattctgctcttttacgttaattgggaggtgtccaactgcctgtaccgcatccgtgtgaaaatatatgcctttttctttgcagatcgcgccgatctcagggattggctgaatgcttccaatctcattatttgcatacataattgttacaagacatgtatccggacggatggctgcctcaacttcctctaaacgaaccattccattctcatggacatccagatatgttacttcgtaaccttctttttccagtttctgcagtgtatgaagtactgcatgatgctcgaaggcagtagaaataatgtgttttttatttctgcgtgcgccccattttgctgcagatacgatggcctgattgtcagcctcgcttccgccggaagtgaaataaatctcattcggctgtgctccgatacaggctgcgatctcctctcttgctttctccagtacttccttggacttctgtcccggagtatgaagacttgatgcgtttgcatatacgttttccagacatgggatcatagcgtccaatgcaacctggctcatttttgtcgttgccgcattatcaaaatatacgttcatagtccctcacactttctattcttagtattgtattttatctattgtttccttaattcttggatatattatcatagtattcccctaatgtcaataggaattggggtaataaaattttaaggttatgaagaaaggactcgggctattttgtcttgtaagctaacaatcgctttccaagaaaaaatagcccgagtcctttcatttacgttacatatctcacgacaccacaataatgttcgtataacgttttaataccacatccggaagtttttccgtgatgatctgtgccgattcaaaggttccaaaccgaatcggattcacctgatgaaatttggtactgtcacacagcacataggatttcagactgtgtgtcatggcacattctttgatcttagcttcgttaatctccggtgtggtaaatccaactgccggagatgccccgttggttcccataaagcattttgtaaaattgaatttctgcaaactcatacacgcttcgtttccaacaatggcttctgtggcagctttcagttcaccgcccagaataatgacatgaaatccttttcccgccagttccagtgcatgtgataccgcatttgtcacgaaagttgccgttttctccgtgatatatggaatcatgcatgcggtcgttgttccggcatccagatatacaaaatcatgtggttcgatcagagaagcggcatattctccaatctgctgcttctcatcctgatacagccccttgcgctgtgaaacctgctcatcttttgtggcaagatttgactctgccagcatggcaccgccaaataccttgaccaatgcacctttttcatccaacgtattcagatcccgtcggatcgtagattccgaagcatcaaaatactctttcagctcctgaaccgtcacactgcctttcaaggtaagcaggcgcaatatttcctcctgcctcttttcagttaacatacaacaaaaatcctcttttcccttatcaattgcaaataattatataacgtttcattccaaaatgcacattgcattttgctgtaaaatacacattctatattcaagaatgctccggcattcttgttgcgaggtgcgcgtcatgcaattgcatgacatacttcaactgcgcacctctgtactcctgccggaggctatatcagatgggggattggctcccaccactgatactagcttgtttctcaccacctatagaggtgggagtcatctcccatctgatgtatataatatctcttttacagttctctccaattcttacagaaatcaatgtaagatcagagataaaattttatttctggtgcaaccattttttcagaatttcttctctgtttacgctgctgtctgtctcgcaaatcagacggcggatggtcagcagacgtcccggagatacggacagctcatcgatacccattgccaagaacagttctgtcagatcactgtctgcaccaagttcaccacagataccacaccagatgcctgctttatgtgcattctgaatggtctgattgatcatacgaagtacggcgatatgatgtgcatcaaagaaggaatccagtgactggttctgacggtcaatcgccagtgtatactgtgtcagatcattggttccgatactgaagaagtctacttcttctgccagcaggtcactgatggttgctgctgccggagtttcgatcatgataccctgctctggtgtgccatacggaacattgtctgcatccagctccgcttttacttcttccacgatagctttgatctgtgcaatctcggataaagaagtgatcatcggatacatgatcgcaatgttaccaaatgcacttgcacggaacagtgcacgcagctgtgtcttgaaaatttccggtctggtcaggcagatacggatggcacgtacacccatagccgggttttcttcttttgccaattcaaaataatctgcctgtttatcagcaccgatatcaagagtacgaatgataacacgtttgcctgccatcgtctctgcaacttttttgtatacctcaaactgttcttcctctgtcggataagtctcagattccagatataagaactcacttctgaaaagtccgataccttctgcaccattctgaagcacaagtgccagatctttgacatttccaatattggcgtaagttaaaacttttttaccgtcaagggtaacgctttctttatttttaaaggtctgaagaagttcttttttctcctcttcctcttttttcagagcttccattttttccatggtctctgcatccggctccacgtagatcataccgtgatttccgtctacaacagccagttttccgtccagatcatcggtcagctccatctctgtgctcaccagcgccgggattcccatggtacgggcaaggattgctgtatgggaatttacagaaccatgtactgttacgaaagaaagtactttgtctttttcaagctgaacggtctcactcggagccagatcgtctgccagaatgatcactggctcatccgtaacgactttgctcttgttctcaccacttaagtttgcgatcacacgctcggaaatatcacggatatctgccgcacgctctttcatatagtcgtcatccatctccgcaaacatggaagaaaaatgatcgcttgttactgctgtcgcatactctgcatttacctgctgggtgcggatgatattttccacagaatcctgataatcctcatcttccagaagcatctgatgcatttcaaaaatagctgcatttgcctcgccgacttctttgaccgccttatcatacagttcgcctaactgtgcctgggcagcttccttcgcatcctgaaaacgttttacttcagcttccacgtcctcgattttctgacgtgttacctgctgctcaccttttttgtatacacataaatgtccaatggcaatgccaccaaatacgctttttccctgatagacgttcataccaaactgttcctttcctaatcttaatatatttgtccgcttcattttttattcaagtcgaacgcatgtgagacttggtgcgtgattctggtcagcgaaagctgacatattcttctcagaat

SEQ ID NO: 13398 - DNA, 145 bp, Unknown
  gut microbiota DNA sequence
gggtggctgccggatcaaaaaagaaaatgatgtatgcgaaagtcgcagtgatgccccagccgcacggatcatttgaacatagaggtacggaatgtgtaccacccattacagcgggaaaagctgttaagatatacgctggatttac

SEQ ID NO: 13399 - DNA, 476 bp, Unknown
  gut microbiota DNA sequence
aagtgagaatatgacaaaacagtacattgatttcatgccggaacgtattgtatcggctgaagataaatatttctctaaaaatcagtcatttaaattgaaaggagcagaagatgatgaaaggtaatattaatttgatttcgtatgactgttatcaacaagctacagaaaaacagttggcagggctgaaatggaaggaaaacagggtgtactacatatctgagattcataatgaaaagatacaggatgagatttatgggtatatcgatgatagatgtagacgtttgtcattatcaacagtagtaaatgatatttacagatttgatctgttgaaagaatttctgaatgagaagtgtacaagttgtagcagcattactgataaaaaatgggaagaactggagagaagttataaagcatttttatataaaaaaggattggcgctgtacgttagaagaaatagaccggataggcggaatgtt

SEQ ID NO: 13400 - DNA, 1199 bp, Unknown
  gut microbiota DNA sequence
agcgacagcgagattacatcctacttgcagaagcgggtgactgaatggaatccgtgctatcgctgtgtgatcaaaatagagcagagttatgtctgaaaaattcgtttccggaaagattccggtgagaatgtaaatgtttccagaaatactttgttaaaatagtaggtgctggaatatccgagcatggatgcgatgccattaattggaatatctttgtttttcagcaattggatggctttattcatgcggatttccgttagaagttcagaaaagcctttcccggtattttttttgaaaatacggatgacctggcgttcactgtaattgaaagcaagagcaagttttgacagcgtaactgtctggtaatgcatttgcatataattcagcagggaacggaaattttcatcagaattattgatatatgaagtggaaaaaacagcttcatcttcatgggaacgcataagaatcagaataaattccatgacaagcagctcaatcattttatcgcagtattttagattattttcccattcttcatagacctttaagaccaattcttttaatgcagagtcattctgacagtgccagataatatagccgttagaatctccgtaaatcacattggaaaacagtgtggataaataattattgttattcagcaaatgaaagaaaacagtatcaaatgttgtgacacgcagaatgaaatcaacaatgatgctgtttttattttgtgtctgaaatgtgtgctgaaggtttggaggacataaaataatatccccatcctgaagtggggtggatttctccgcatcaatcagcaggctgtgatcacttttcagaacataattgatctcaataaactgatgggaatgcatcagcagtggcatatatctcagatttttcaaaatacagacattttgattttccgggataaaaaaatcttcagaaagatgtccggatgaaccggtgagaaaaaaagtctgatccgggagctgcttgtgccattccgcttccagcaaatgcagcagatatatataatcctgctcatttgctaagggattaatgattttggtctgataaaccggaaattttttcaaaaaattttttaaaaaatgctcagtgtcattaagtggaagcaaattgttctctgatatcatgataactgtctccttttgcaacagctactttcggaatttttctaa

SEQ ID NO: 13401 - DNA, 1167 bp, Unknown
  gut microbiota DNA sequence
attataataactgtaaaaacccccaatacattataagttttttgctacccccatagtaaaaaataccttctccttaaaaagacagccgttcggatttggctgtcttttatttttgtttaaaaaatactactatgagaaatgtctgttgtactacacacataatagttttacccgaaagtatatacactaccaggtaaaactttttattttagtttcattcattttctattaactattcgctacatcttctatcgcagttttctttatatgttttccaatgatctcagacacgtcactgaccgtaataaatgcagaagtatcaacttctttgatcagacgtttcagttcatagatttccagacgattcaacacacagtacaatacaactttctttccactaatcagaccttcgccctccagcattgtcacagttctgccaagcttctgataaatctgatccgcgatttcttttccctcgtcagtaatgatcatagccgctttcgcctgctccagaccagtctctaccttatcaataattttcgatgtaataaaataagtaagaagactgtacattgcgcggtcaaatccaaaaagaagtgccgctacaatataaataatcacattaaaaatcagcaccgtctgtcccaccgggaacttgaatttgcggttcagcaaaattgccactgtttccgtcccatccagacagccgccaaatcgaatgaccagacccacacctgctccaaggatcacaccaccgaaacatactgccagcaaatactgatctgtggcattcacccacggcgcaaacacttccaaaaatatggaaaacatcgccatagcatagccggattttacgataaatgtcacaccaagttttcgggaaccaatcagaagaaacggaatgttcagaacgatggtcagaatacttaacgggatatgggttaggttatttaccatgatgccgataccaatgacaccgccatccaagatcgtgcagggcaccagaaattcttcaatggcaaatgcagcaatggcagatcccacggtcaacatcagaaaatctaaaaacagtcgcattttcgggttcaattctctcattcagattcctccttttttaatccagctattttgttactttcctttttctctgatgatcattacaattcg

SEQ ID NO: 13402 - DNA, 655 bp, Unknown
  gut microbiota DNA sequence
ttaaaagtcaaagaagtcaaaaacgtaattgacattttgatatctttgtgtataatgtaaatcaagaagtcaaagaagtcaaacaaatcgaaaagaaaggaaggagggctgtggattgaaatatagggttgtttcggttttgaaagataatagaccacgttttttgattatttctgatattgaagaaattgaaatccttccatcaaagtatttgaagcatctggatcagattaatgcttctccgaatactgtaaaatccgcagccttcgcactttcatattattacaattatctgcaggagcaaacgataggattggatgagattacattgctatcctattcagagcagaataaacattttattgatttcttgtattgggttaagagtggaaagcatactgagcataatacacagacgagcaataagacctgcaatatgtatcttggtgcagtcttcagatactaccagtttttggcactggaagatgtcttgccaatgcttaaagtcttacgagtaaaaaaagtatcatattttgacagtatgggagtaaatcatcaaaatgcagtgaattcgtttaaaggtttcttcaaagaagaagaacctaatctggaagaaataacatccgaagaaatacaggagctgataaatgcctgt

SEQ ID NO: 13403 - DNA, 420 bp, Unknown
  gut microbiota DNA sequence
caccgaattttgcaatggtcggataaatgtttaatcctgtaagaaccacactgatcagtaccagaatcagactcgtccactttcctgctgtcagcatatccataccacggctcaggaaaaaatttgtaatcccctgtccaatgcaacaaatgatacctccaaccagaaaagctttcagcatattcaaaggtaaactgtatgttggtgttacctgactgacataagcatcgtatgcattttttcgtgcctctttttcttcctcggttttggcatcttctgcttttaaaatttcccggatcagctcttccctcggtgtatttttgtaatctgattttgtttttttcttattatcattcaaactgttaaccacccttcagattctaatttttgtttttcttatgcgatccataaaaaatagac

SEQ ID NO: 13404 - DNA, 3468 bp, Unknown
  gut microbiota DNA sequence
attcgctgaatacagaggataaattatcttattatttaatctggcctgccagtgcttcttttgctgctgcgatcgcatccgggattcctgccggattctttccacccgcctgagccatattcggacgtccgccgccgccaccgccaacttttgcagcaattgctttgatcagattacctgcatgtgcaccctgtttcattgcgccgtcagttgccatagctaccagacttacttttccttcgttcgcagatgccagaacaacaacaccctcaccaagtttctcttttaactgatcgcccagatcacgaagtccgttcatatcaacgttctccagtgcggttgccagaagtttcacaccgtttacttcttctacgcgatccataacatcgccaagtgcatcctgagcagctttgctctttaaggactcgttctcgctgtgaagttctttcacttctgcctgaagatgagtgatcttttctatcagacctgctgcatttgttttcagtaatgctgctgcctcgttgatgatctcctcaagtttgtcatagtaagcatataatgcatcagaagtcagtgcctcgatacgtcttacacctgctgcgataccggactcagacacgatcttgaatgcggaaatctcgcttgtatttgctacgtgtgtaccaccacaaagctctgtggagaagtcgcccatttttacaacgcggacttcatcgccgtatttctcaccaaacagtgccatagcgcctgttttctttgcatcttccagactcatgatacttgtctcaaccggaagtgcctctgcaattttctcatttacaatagtctcaacctgttttaactcttcctctgtcatggcggagaaatgagagaagtcgaaacgcagacgatccggatttacatcagaacctttctgctctacgtgagaaccaagcacattacgcagggctttctgcagtatgtgagttgcactgtggttctttgcgatcagagaacgtctctttgcatctacttccagcgtaacagtatcaccgactttaatcataccttttgttacacgaccgatatgtccgattttaccacccagcatttttacggtatcttctactcggaactcgccttctgcagtacggatataaccggtatcagcggtctgtccacccatggttgcgtagaacggagtctcgtttacaaaaatagtacctgcttcgccatctgtcagtgcctcaaccagttctgtctcactggtcagaacagttacttctgaatcatgactgaaacgatcatatccaacaaatgttgtggtaacggacggatcgatggcatcataaacagttgcatctgcgcccatgtagtttgttacttttcttgctttacgtgctttggtacgctgttcttccatagctgcctcaaagccttcctgatcgatggtaaagcctttctcttccagaatctcttctgtcagatctaccggaaatccgtaagtatcatacagacggaatgcatcttctccggaaagaactttctttccttctttttccatctctgcctgcatgtcagccaggattgcaagaccctgatcgatggttttattgaatttttcctcttcctgtgtcagtacacggaaaatgaactctttcttctcttccagttccggatatccgtctttgctctcatggatgactgttttgctcagttctgccaggaacagtccatcgataccaagcatttttccgtgtcttgctgcacgacggatcagacgacggagtacataacccctgccctcgttggtcggcatgataccatcagataccataaatgtagcggaacggatgtgatctgtgatcagacggatggatacatcatccagtgcatctgtctggtaagttttgtgagacatctcacatattttatcacggattgctttcattgtatcgatatcaaatacagaatctacgtcctgcataacaacagccagacgctcaagtcccatacctgtatcaatgtttttattctctaactcttcgtaatttccttttccatcaccgttgaactgtgtaaatacgttgttccatacttccatgaaacggtcacagtcacagcctactttacagtccgggctgccacagccgtatttctctccacggtcatagtaaatctcagaacatggaccgcaaggacctgcaccatgctcccagaagttatcacactcaccgttttcatcacggtaaaaacgtgtaattctttctgccggtacaccgatctcttttgtccagatttcaaatgcttcctcatcctctccgtaaatagacggatacagacgctccgggtctaactccagaacttttgttaaaaattcccaggaccaggcgattgcttcatgtttgaaataatcgccaaaagagaagttaccaagcatctcgaaaaaggtaagatgacgtgctgtctttcctacgttttcgatatcaccggtacggatacatttctgacaggtggaaactctgcgcttcggcggaatctctgctcctgtaaaataaggttttaacggtgccattcctgcattgatcagcaacagactgttgtcattatgcgggatcagcgaaaaacttttcataacaagatgatctttgcttttgaaaaagtcaagatacattcttcgtaattcatttacaccatactttttcactctcgtgttcctccatctatgtgtttattttgaatatctaattcatttatgcaatcactgaaaacagtacaattacacactcttatcataatatcatagcatttcttccttgtaaagcgatgcattattttatctcatttccaattcaggctaaaataattactctggaaaaatgcatattagttttgaaaaaacaggtaacttatgctagtcgaaatcatatactaaactccacctaagtttgacttaattaaagtgcttactccttaccaggcaaaaactttccacgttttttcatatgtatcatattgtatacaaagcctttgttctccggatttgtgcgaagcgacaccggaaccggcacacatccacctaccatggacgccagaatcatccagcccagatttttcatcgggaagaaaattagtgaaagtgccaacgccccaagcggctgctgcaatacagttcccaacagtgcgcctgtcaccagcaccacactgacgatctcattcgtatgaaaaattgctgcaaatccatatccgatgctcagtccactgaaaagcattggaaaaaaatgtccgcctctccagccggaagcaatgcagacatttgtcaaaaacagcttcaccacaccgatcacgatcaacagatacggtgtaaatttcagatattcatactgcatagtctgaatatcactgccgccagaaaacatagtcatcggaagtgccgttccgatcaacccaagaatcaatccaccaagtaccgcatttaaaactgccaga

SEQ ID NO: 13405 - DNA, 1898 bp, Unknown
  gut microbiota DNA sequence
caccgtcagtactaccgcaaaaaacaaaaacagtaccacacagtttccaagaatatattctgcttccctgtcatttttctttccacgctcaatggaaaaaagcggcgcaccgcccattcccaccagatttgcaaatgcgatcacaattgtaatcatcggcagacacacaccaacgcccgtcagcgcatccatagaatcgccgccgatccgcccgataaacatacggtccaccacgttataaagaacgttcatcagctgcgccagtgtcattggaatcgccagacgcatcaaaatttttataatacttccctttgaaaaatctccattctgtgtcattcctgactaagcacctgctttctaaatccctccaaaatacattttttgtgctttttagtgcccacaattacagcacttatgaatacttcctgcttggagctgcattggaagccactgttttccatctttttcatacagctcaccactcgttgtaaatccaactgtctcaaaaagcggtaccgcttcctgcaacacatccgcattgatcatctgtgctcctgacatcatcgctttgtcgatcagcagacgcacaatgaaatcgccatatttttttctgcgaaacttcggcagcacagccacttctttcatctgataggatgctccatcaaaagaaatcccgccggttgcaaccggcgtttccccttcatacgccagggcatacatgcaaaacgcgtccggttcttcctttatcggaagctgcagttcctgacctaacaccgcattgcggatatctgtcacctgctgcatctgctcatttttttcactcccacttactaatttcccgaataccatagccacttcccccttctgctgttgtctctgttaaaatcccgcatccattggcaacctgccattcataaaaagattttttcggcacgccgtatcgctccataacagacataattgtaccaccatggcacacaattgcaatcttctccagacctttttcccttgcctctgtcacacatttctcatatgccgcacagcaccgcctgcgaaaatccgcgccgctctctccgtttggaatcagcatctgaccattgctgtcaatccagacctgatacaacggatcatctttcaattcttcataatttttatattcaaaatccccgaaatctgtttcctgcagtccgtcccacggcacttttctctgttccgggaacaaaagatccgccgtgtcccgacagcgaatcatcggactgacataaatcagatccgcttcaaatccaatcccccgctgctttcgcatttttaatttttcttttgcatctgcggtcagcccttcatccgttctgccgacataacgccgctcaacgttaccctgcgtctgaccatggcgaatccataaaatctgcatgtttcatgttcctctttatttatactaaatggatattcgcaatccatttgcaccacttgctcatcccccagcagctgctctgcgattattcatctgcaggatcgaaacatgtaattttccttactgggtgaactacccattgtctaaagccaatgggcttcctgcttcgcagacctcgtaacctactatctccacaggcgttaattcggtcagtccctgccctatattgttatttttatgctatttgtcttaatccttcttccagtatattttttgctgcgttgatatccctgtcatgatttgttccacagacaggacatgtccattcccttactaatagattttttgtctctgtattttggtatccacagactgaacacagctgactactggcatagaacgtgtctattctgacatatttcctgccattccactttgccttatattctaactgtcttgtcagctcataccatgatacatcact

SEQ ID NO: 13406 - DNA, 647 bp, Unknown
  gut microbiota DNA sequence
gcaattcctccgccagataaaaagaactgttatctccctgttcaaaagacaggcagggatatttttccaattgctccattgtcaaaaaagattcatccgccagcgggtgtcctttccataaatatacataggctttgcaggaaatcaatggatgaaattccagatttgctgatttaaacagtttttccatagacttccggttaaattcactcagatacaacacaccgatctcacttttcatagtgcttacttcctgaataacttctattgtctttgtctcgcggattgccagttcgtattttgacatatccagttttttcgccacatcaacaaatgcctttaccgcaaaagagtagtgctgggtggataccgcaaatttctttttataagaaccgccttctccataacgctgcagcaactgctcatactcccggtaaagttcccgggcatacgtcagaaattccacaccatcatttgtcaacgtcacgcctcgtccggtacggaagaaaatcgtaattcctacttctttttccagttcttttaatgcattggtcagcgatggctgtgaaacatacaactgctctgctgccttatttagtgatttcgtctctgcaatggtcattcaagaatgctccggcattcttgtt

SEQ ID NO: 13407 - DNA, 2702 bp, Unknown
  gut microbiota DNA sequence
ataaatagggttcatatctttaactaagggaaactggaaaatcttttccggatgtaagtattctggaagatgtgtgccgggaactggatatttccgtcagtgagttgctggctggaaagcggatcgcatctgaagattataaggaagagacggagaaagtgttgatcgcaacgatcggtcagagacagttgatgggatttgaggtagtatgttctattttaaaactgttatttatatttttgattatgtttccttctgtagtgaacggtacatttcttccaaaattaaacctgataaccattttttcatggagtatggcagctattttaggtggttgtatgacttatatggatcgtaatctgccggaaagaaatttcagaaaatccaatccggtaatgcagggaattttaatagtcattacatttggaatttatctgttggcaaatgtattccgacctgccaataatatgtttagcggggtgacaatgggagaaaaaataaaatttacgatcatcattttacttatagcagtttgtctgtttgtgtttgctgccgttgtagcaaacattcatcgggaagaatggcaggaagagaaagaagcagaaaacagaaatgaataaaggacggtgcatgtatgacttctgaaatggatcgtggtcatatttatttggcaattgacctgaaatcgttttatgcttccgtggaatgtcgggagcgtgggttaaatccaatgacaaccaatttagtagtggcagataagagccggacagagaaaaccatctgtctggctgtttcgccttctctgaaaaaatatgaaatcccggggagagcccggttatttgaggttgtgcagcgtgtgtgggaaatcaatgcgggacgaaaacgccgggcaacggggcatcgttttatcggtcagtcctgggatgacggtcaattacagaaaaatccggatttggcgttggattatctggtggcaccgccgcgcatggctttatatatggaatacagcacaaggatctaccagatttatatgcagtatattgcgccggaagatatgcatgtctattccattgacgaggtgttttttgatattacccattatctgcatgtatacaaaaagacaccgcgggagctggcagcagaaatgattcagagtgtgtacgaacagactgggattacagcgacggcgggaatcggaacgaatctgtatctgtgtaagattgctatggatattggcgcaaagcataccgaaccggatgcaaatggtgtgcgaatcgcagaactggacgagcagtcttatcggaatcagttgtggaatcatcgccctctgacggatttctggcgcgtgggaagaggatatgcgaaaaagctggaagcagcaggactgtatacaatgggcgatattgccaagtgttccgttggcgcattcacagatatttataatgaagattttttgtatcagatgtttggaattaatgcggagcttttgatcgatcatgcatggggatatgagccttgcaccatggaagacattaaaaagtatcagccggaaaataatagtcttggttccggacaggtattggcgtgttcttataatgcagcaaaagcgaaagtggttgtgacagaaatggcagatgcgctggctttagatttattggataaacgtctggtgacagatcagcttgtattgacggtaggatatgaccgggagaatctggcaaactaccggggagaattgatgatggatcgatatggaagggctattccaaagcatgcacatggaaccattaatctcaaacagcagacatcttcttccaaacagatgacagaggctgtgttggaactgtatgatcggatcgtaaatccaaaactgatggtgcgcagattaaatctggtggcaaatcatgtggtcagcgagcaactggcacagcagaaagtgacttttgagcagatggatctttttactgattacaaagcagttcagaaacagcaggaagaggagcagcgtgagctgaaccgggagaaaaagatgcagcaggcgatgctggatatcaagaaaaagtttggaaaaaatgctatcctgaagggcattaatatggaagaaggagccaccggacaggaacggaataagcagatcggagggcataaggcgtgacagatcagtatttggatggaagcagacaggaaaatgggaacgaaataaacctttgtaaaaatcagaatataaaatttgatccgtatgcagacattcgttatttatcacatcatgaatcaaaaacacatccacgaatgccgcgggcaaatcgtgcagctcagtttatgcctttttcggcattaagtggatatgaagaagcggtgcaggaaaccgcccgtcagacagaacagttccgggaactggatgaggacagcagacgccgattggatgaaacgctgcaggtcattcagcagaaccttggaaaacatctggaagtacctgttataattacctgctttgtaccggataaattcaaagatggtggcagttatcaggaatattccggtttagtgaaacgtgtggatgcgtatcgcagacggattttattgttagatggcacagcgcttccgattgatcatattactgatattcagatgagagaaagagaataacgaatcattgacggacggattggaacgaaaataataagaggtgtcgaatgaacggc

SEQ ID NO: 13408 - DNA, 5203 bp, Unknown
  gut microbiota DNA sequence
atgtttagtatttttattttatcctggttatggtagaataaatcggtatagagagtgaaataaattaaaaaacaggaaaatgagcatatgaaaaatatattgatgataggaactggaggcacaattgcttctaaacagacagaatacggactggcaccgggactttccacggaggatattttaaattatattccggcggtcagcaaaatctgtgaggtagattccattcaggtgtgcaatctggacagtacgaatgtgacaccggagcactggaaactgctggtaaaaacagtcgaggaaaattatgataaatacgatggttttgtaatctgccatggcacggatactctggcgtatacggcggcagctttgtcttatatgatccaaaactccagaaaaccgatcgtggttaccggagcgcagaaaccgatcgagatggatgtgacagatgcaaaaacaaatctgttggacagctttatctatgcttcggataacgattctcaggacgtcaacattgtgtttgatggaaaagtcattgtcggaacaagagccagaaaagagcgcgcaaaaagctacaatgcattttgtagtattaatttcccatatcaggcagtcattcaggatgggatgctggtgcgttatatcacagagatgccctatagcggaccggtacgtttttattatgagatgaaaaacagtgtttacgtgttgaaattgattcctggcatgcagccggatattctgccgtatctgttcgaacggtacgattgccttgtggtggagagttttggtgtgggcggaatcccggagtcattgttggatgaattttatacgcagatgaataagtggaaagataaaggaaaaattcttgtcatgacgacgcaggttgccaatgagggcagtaatatgacggtgtatgaggttggaaaaaaggtaaaactggatttcaagattctggaagcctatgatatgacgctggaagcaacgatcacaaaaatgatgtggctcatgggaatgggagaccagacttttcaggaaatgaaacgtgatttttaccggttggtgaatcatgatattctgtttacaaaacgcattgaaggagaatttcgctaaaaagcaagaatcacataaaagaggattagggcatttctatatatcaatgtcgtaaaaatttgttaaaaatcaggaaatgcataaaaagggacggtcttatgggattagataagaacaagatagaagaacagatctataaattgaaaaagattcaggaaaacattcatgcaattctgtatgcattagaagaaaacagacagcgtatgaaagaaattttggatatgctgcaggcagattcgagtgcagtttcaggtatgtggaatggtcttattgaggattgtacacgcaatatttatgaaatcgagcatatgcaggcaaagtatacagaatatcaaatgtggttagaaaagtatctgtgtttttttgatggagaagatttaacgaagtcccaaagtacacatgcctttatggttcgacctgtattgccgcctgaagaaattgcagatttacttgggtttacattaacgcaagttgaggatttacttgagtttacattaccatctaagaaagttgataatttaccagaggctacattaccatctgagaaaagcgataatttaccacaaggcacattaccacctgatgaaaaaaatataactaattctacagaaaccaatcaggtcgttaattatgattcggaatgtgaatcagaaacagaaatagaacaagcgccagttcccttggataaagtttatttttcagcaattgcccccaaatcaattttaaaaggtgagtactccatgattgaaattttcatgtatgaggagaaatttcgacatgtagtggacgcggcaatcgtagatgctgaaaccgccgtcagagaaaagaaatcaggagcaatgaaagctggcaaagaggccaagatcacgattgtacttaactctccggatatcgaaataacagatggttgtgaagaacaaatctggcatggagagtatctgaattttagttttgcggttgagctgccggaagattttcagaagaaacagattttgtttgtagcggaagtgtacattgacgatgtgatagcgaccagattgaaatttatagcaaaatgcacttccgcaaaagagcagaagatcgagattaccagagaagatgtattatcagcatttatgtcttatgcaagtcaggatcgtcaaagagtggcaagaattattcagggaatgagaaaagcccgcccggatatcgatatattcttcgatgttgacagcttgcgaagcggggatgattggaaacaggctttgtggagagaaattgataagagagatgtgctgtttttatgctggtctgaatacgcgcgtgaatcaaagtgggtggatgcggaatggcggtatgcttataagagtaagggacctgagtacattgaaccggtgccgatcgatccaccgagtaaatgtccgccgccggaagaattagcgaaaaagcattttaacgataacttgttatatatcataaatgcagaaaaagatcgcgaaacgataccagatagagaggaatggacggttgaatgataggtaaaaagagtttcctttgaaatttctgtacggtatgataaagaaaattatgggcgagaacgtcgcagcatcattgtagaagaatgtggaggattggagatatggaaaaaaacattgatattgcagcacttggcgaattattgattgattttacagaagctggaacaggcgcagatggaatgcgtttgtttgaacagaatccaggcggagctccggcaaatttgctgacggttgccagccatatgggatatcgtacagagtttatcggaaaagttggaaaagatatgcacggtgcatttctgaaaaaaacactggagaaaaaaaatatcggtgtttctaacctgatcgaagatgacaattatttcacaacactggcatttgtagctattgatgaaagcggcgaacgtgaattttcttttgcgagaaaaccgggtgcagacactcagttacgagctgatgaactgaacaaagaacttttacagaattgcagaatcttccattttggctccctgtcactgaccgatcagccggcaaagaatgcgactgtagcggcagtaacctgtgcaaaagaggcaggtgcactgatttcttatgatccgaattatcgtgcaactctgtggagcagcgaagcagaagcagctgaaaatatgaaatccatgattccttatgcggatgtcatgaaagtatctgatgaagaaagtctgcttcttaccggagagacaacctatgaagccgcagcagataaactgcttgcaatgggaccgaaacttattgctgtaacccttggcagcgaaggcgtacttatggcgacgaaagagaaaaaagagcgcattaaaggattttccgtacagtctgtagatacaactggtgcaggtgattccttctggggcggcactttaagtgcatacttatcactggaaaaaccaatcgaatccctgacctgggaagaaattcaccattgtgccgtatgcggcaacgcaaccgcagcactctgtgtgcagaaacgtggaggaatcccggcgattccgacaaaagaagaagtggagcagatgttaacagaaaaattatgttaaactctggtgagcggttgtagcagccgaatgcaagtatctgcgcacgcagcttaccggtcaggtatttggaaactatatcctggcattggtaatatatgtggcagctttgtttgcaatattggtaattggttggtcagcaagcatcaacacatcatggcagccgagcagtatttattatattttgcagtgggtaaaagagtggatcattgccattatgatcatattgatactggttggatggatcattatcacactgcggtttatgacacgtccgctgcgctatctggatgagttggtggatgcatcggaaccaaaacggtggaatcggaagcgagcgggattaggattacttatcagtctggcacttatgactgcggaaggatttgcactgcatgcgacagactggcagaggcatgacagtatgtatgtaatgttaccaattgtgggtcgaatctgtatggatcaggcactgattgatatcagtgagctggaagatgatatggtgaaaactgaggatgttgtaactttgattggaacagatggaaatgagatgcttaccgcagcagatatggcggaaacagctggaacgatcacgaatgaaattttaagtcgactgggaagtcgcttggaacggtatatcagatgggagatgactccaacctctataggtggtgagaaacaagctagtatcagtggtgggagccaatcccccatctgatatagcctccggcaggagtacagaggtgcgcagttgaagtatgtcatgcaattgcatgacgcgcaccacgcaacaagaatgccggagcattcttgaataaggaaagtagttaatgtgaaatgttcttgtgaatgactatcactatgtaaatgaagaaatcggaggctccttctggggcaagcggttcagtaaacgactgagttttgcatgcacagcgtaaaagtatgttgtatcctatagttatatgtgcatgcggcacgcaattgaatgaagtggcattgtggagtgaaaatttacggaaccataacgtaaatgcgtcaccagttatttttcttgccgagcgattgttagccggaaagacaaataactggtgacgctttccatattccaaattttcaccacaagccacgaaaatgagaattgcgcaaataattggcacaattcacacaatagcggtaaaaactgcaagatgacctacttcgacaaatccgcccgaaatgtgttgacttctgccggcagcagtgctattataagcaagctgtcgctgatgcagcggcacatacagaagaaaagtaaggacaacagacggcatgggatgcgacagtcagttcttgaaaaacttctggatgggaagaaaaaagttgttgacaaagccgatcactggtgataagataaacaggctgtcgcttgaaacggcaacaaagaaaaacaaaaaagttgttgacaaagacaaatgcttttgataaaatataaaagctgtcgcaaagacaacgaacaaagaa

SEQ ID NO: 13409 - DNA, 7263 bp, Unknown
  gut microbiota DNA sequence
caaaaaataaaagataagaagaatatggcattggaatgatttatatgcaaaatcgtttcagtgtcatatttttttctctattttcgaagaaaatattgtatattatatataatatatgttaaaatgagagacagaaatggtaatgcgtatgaagtaatttagaaaagagtcgaaggaggaccttacaatggaaaaattattaatcttaaatcctggttccacatctacaaaaattgcttattatgaggacgagcagcagatttttgtagagagcatctctcattctgcagatgagatcgcaaaatatgacctgatcgtagatcagtatgagttccgtaaagatatgatcatggaagttctgaaagagaaaaatgtaaaactggaggatctgacaggtatcgttgcccgtggtggtttacttccgcctctgaaggcaggcgcttaccgtgtaaatgatgacatggtatggcagctgaaaaacaaaccggcaatggagcatgcttccaaccttggcgctgtaattgcagatgcgatcgcaaaaccacttggaatcccggctttcatttatgacggtgtaacagttgatgagatgatgccgatcctgaagatcacaggtctgaaagagattacaagaaaaggtatcggtcacaacctgaatacaagagctgcagctatgaaatatgcccgtgagaataacaaagagtacaaagactgcaaactgatcgtagtacatcttggtggtggtatttccgtaaccttacagtacggcggaaaagttgcagatatcatcaatgatgaggatggcccattcgctccggagcgtgcaggcggtcttccggttcagtctctgatcaaatattttggtgagagcggcatgactacaaaagaaatgctcaagaaaatgaagagtcgtggcggtctggtagcacatcttggtgtaaatgacagccgtgaagttgagaaaatgatcgagaatggcgatgagcatgcaaaactgatctatgatgcaatggcattaaacgtagcacgtaagatcggtgaggaagcagcaacagttgcaggtgatattgaagccatcattctgacaggtggaattgcatattctgagtacttcacaaacgaagtaaagaaaaatgcagagtggatcgcaccggttatcgtatatccgggtgagaatgagatggaatctctggcacttggcggacttcgtgtactgcgtggacaggaagaagcacacgaatttgtaagaacagagtaattaacatttctgcttagaagtccgaaaggattttctataaagggagcattcttgaattatatagaaccgtagtagcatgatgattatctgatattagtcggaaaatattcgtgttactgcggttttttgtttataaaaaatgactgttaattttttactaaagcgaagacacattttcttgttacgtaaattgagaacgcctgtattttttctcagagagcgattgctagcgaccgagaccaaatacaggcgttcgacttaaaaacctaaaagatataaaaatataaaaacactgggggcaattttaaaactctgtttaagacgcaatccggcgaaccggttttgcagttctggaaccatgggcgatcggtttccattccactttcttaaacattgcaacaaatgcgatcggaatataagtcagcatataaatcgggaatgtgaacatatatccgatttttttataccatgccatatgcatgtgcttccattctgtcagtgttgtgtagataccaagtaccagcatagctgcggatgtatttaccgtaaacttaccgacacagagcagtgctgaaacagaatcctgtgctgttaaaagtgccagaatcgtcaatgtcagtcctgcaaaggtggcaaccattgtcaggataaaggccggaaggttggacatcagcatgtcgaaacaggagaagccgccctttttgccaactttggataataactgtctgccgtattttttgtatacctgaaaataacctttgacccagcgcatacgctgatgccaggatacagaaaattttgtcggctgttcatcgaaaaactctgcgtgctcacagtaaccgatttttataccatttgcgatgcagtcggcggtaaattcaatatcctctgttaaaaggaagaacttccaaccgtcatttttctcaatcagttcacgggagatcatataacccgttccggataccatacagctgttgccagttctcattctgccacggtttaaaaattgcgcttcatgtaagaaccagagaccataaccgtgggaaatccagttgtcaccaaagtttttggagttacggtagcttgtaacggcgtcgtatccatcgttaaatgtcttgttcatttctgctatgtaattctcatccagaagattatctgcgtcaaagataaagaatccatcgtaatcttccagattgtcgctgagtgaaatctgatccagtaagtattttaaggcatatccttttccaacctgaatccggttaaaacgttcatatacataagcaccgtgtgcataagcaacttctgcagtagaatccgtgcagttatcagcaacaacgtaaatatcaaccagttcagacggataattctgtgcgtgaatgctgtctaacagttcaccaaggacattttcttcatttctggctgcgatcagtactgcataacgatgaagctgtaatggtttgtggggctgctctttcttaatataaggtgcgatcaagtagataatctgataagcaaaacaggcaatgaatgtaaataagatcgaccagttgatcacacgggtgattgtaactaacataattggttcctccctgtgcttgtgttttcattttcgttatactcaatatatcagctaaatgttaggatttacggtggcaatcattaacaaatccttaagaaacatggttgaaaagataaagaaatgaatcgtttccatattatataagtataagattatataaggcgtgtgatagaagaatatcattgattcttcaacctaaattttgttgttaaaaattcaagaatgctccggcattcttgttgcgaggtgcgcgtcatgcaattgcatgacatacttcaactgcgcacctctgtactcccatctgatatatgtctaaacttcatgccatacagtctcagttcctgctcataaagagttgcgatatcttcataaatcgttaagaatttggcgcggtttccggaaagaattgtctgttaaagtgtcagcataaaggaattagggaacgattcctttccgaatgcattcaaatcgagtataataacggggaggtgaaagattatgataaatattttagtatgtgatgatgataaagatattgtagatgccattgaaatctatctggctccggaaggataccatatcttaaaggcatatgatggcattcaggccatcgaaatgatgcgaagcaacgatattcagcttttgatcatggatgttatgatgccgcgtatggacggtatccgggccacgttaaaaatccgtgaagaatcaaatattccgatcattattctttccgcgaaaacggaggatacggataagattttcggattgaacgtaggagcagatgattatgtgacaaaaccatttaactctttggagcttgtggcaagagtaaaatcgcagctgcgtcgttatacaaaattggggacaatgacgccggaaacagtttccaatgtttaccgtacaggtggactggagatcaacgatgatatgaagcaggtcacagtcgatggcagagtcgtagaaaaactaacaccaatacaatataatatccttcttttcctgacaaaaaacaaaggaagagtgttctccatcgaacagatttatgaaagaatctggaacgaagatgccatcaatgcagataatacggtagcggtacatatccgacatatccgggaaaaaattgagatcaacccgaaggaaccgcgttatctgaaggtggtatggggaatcggctacaaggtggaggatattaaagtcgagtagaacaggagatcctttatgaagaaaaaatatttttacagcatgtgggcgaagatgctgacaacggcggttcttctgatcgccggcggtctgactgcagtctgtgccggatggagtatggctgggctttcttcaggcatgaacgtgaatgagattatgagcccggtttcctatgaggaaagtcagaaggcagagcactatgtgagacgggaactacaggaccagctgggtaaattccgctctgaaactaagattttgcaaggaaatgcttataatggtgatctgactttagatatatctaacttgaatgatggtgtaaatgcagagaacaaaaaccagaatttggaatataaactgtccgatctggatgcattttacaattctgatggctatccgatcctttgctggctgacacagacaaaacatgaatatgtgtatgatgcatatgaagaaggtgatgaaactgataccagcgaatataagacttctaactccagtacggaaactacaactgttcctacagcggaatctgccacagataccaatattccggaaccggtgaatgtagaaacgacgaatatcagtggctggtttgacgcaggtgatggaagtaccggtgacaacagacatccggaagcatatgattcttatcaggtgaaatgttataataatgaatcggacgtagtatatgcaaacggaattgatgttgagcagaaatttatcaaaaatatcaacggtgtaacgctggctgagtatgcacgtgaaaatgatcagctgaatctgctttccgattattatgatgatttgctggaggcagcaagtcaggtacacgatttggtaaaccagacatcgagtatacaaaagcaatatgacaatacaaatgtatatgtatatctggtaaacgaagatgatggtactatatatacgaatgtgccggcctggaatacagaacaggccatgtcccttgaccagttggaagagcagtatcagagcaaagattattctgcacagggtaaatacctgtatctgatgatggatgaggcatccggagatagttatgcatctgtaactttcctggcggatgaactgaagggaatgatcagagatattatgggagacggcaactggaggatttttgtcggacttgataccaattatcattgcagaacatcgcaatcatattatgattccatgtattatacggcttatcaggatatatccggacagattgcatttaactttggaaatggcgaataccgcataaatgttttcgcagctatctgggtattcttaagtctggcaattgtaatgattattatgatcggagtacagaccggacgcagaccggaagatgacgagattcatccggtacttatggataagttcccaatcgagattttgataatcaaggatattattctctgggttgcactggttgttggatatgcggaatctgttgttcacatttcctctaatgatagatattattacagtacattaccgtctgcgtttggaaatgccatggcacagtgtacggttttaggagtcctggcagcagtattgtttgcatggaatgtgaagagttatggacgaagaatcaaagaacgtaaaattggcggaagtatcattgcaggtattgcacatgcaataaaaagaactgtagatgcttccagaaaaacaattcagaattcttaccgtgcccagaaagcaaacaaacagctgttgatcgcatatattgtactgatcggtgcgcagatcatttttatgtggatcatttgtacctttggctttaattatatgggcggactggcatttatcttctttgtgctgatggtattatttgatatttttgtatatttgaaaatgttaaagagcaccagtggaaaggaagcgatcaaagatggtattcagcagttggcagcaggaaacctggattaccgtatcaataccgagcacatgtccggagaaaatctggaactggcagaagaaatcaataaagtacgtgatggagtggaaaaagccgtagatgcgcaaatgaaaagtgaacgactgaaaaccgacctgatcacaaacgtatctcacgatatcaagacacctctgacgtctattatcaactatgtggatatactaaaacgcgaaaatattcaggatgagcggattgccggttatattgatatcctgaatcgcaaagcactgcgtctgaaacagctgaccgaggatctggtggaggcttccaagatcagttccggaaacattaccctgacgatgcaggaaattaatctgaagcagctgatcaagcagacaaacggtgaatttgaagaaaaatttgaagcaaagaacctggatctgatctgtgagcttccggaagaacagatgctgatcatggcagacggacgccggatgttccgtgtcatcgaaaacttgtataacaatgcggcaaaatatgcgatgccgggaaccagggtgtatgtaagcggaagcattgagggtgataccgtcgtattttccatgaaaaatgtgtcagagaatccgctaaactttaaggcagatgagctgatggagcgttttgtacggggcgatgtgtccagaagtacagagggcagcggattaggccttgagattgcacgaaacctgacggttatgcagaaaggtacttttgatctgtatctggatggcgacttgttcaaagtaacaattacattccagagaatcaaaaaagaggagcagaatccaaagaccgaacagacagaatcataaataaaagatgaaagagatggacagaagaaagaaaaagttacggaagttcatctctttttttcaggaataccatgttgcggatcgtgtcgaaattttacgatgagattttcttgagtgctgtcataattgtgctacaattaatgtaacagtaataaaggaggatattgccgtgaaaaaggtacgatatatgatttcagatgcagcagcgatgatgcatgtggaatcgcatgtattgcgttactgggaagaagaactggaattggatgttccgcgcaatgagatgggacaccgttactatacagaagaaaatatccatcaatttgaacagatcaaaaaatggaaagaagaaggttatcaactcaaagccatcaaaatgatgctgcacagtgatcatcctgaattattagaacaggaaaaaacgacgcagagtcagcatttgaaacgggtgccggatcaggagaccgtt

SEQ ID NO: 13410 - DNA, 1857 bp, Unknown
  gut microbiota DNA sequence
gaaaacaaagaatcgatgaatcagactgtcccggcaggaatgtcaaaactggaacaatttcagttaatgatgaatgatatcgtccggaacgccattgctgagaataaccagtcactgggacaggcagtatccgagcatgtgggtgaaaaagtcatcaaagaaatgaattatctgatgcgggagcaggaagaacaggaagaagaacgctaccggaaactggacgaagcaatccgcagcaggcagatgaatcgaaaagagaaaaagcagaaagaaaaactgtcccgaagaaaagcaaaagcagaaaaagctggaaaacatcggttccgcaccaaggaaagtacggtttgaagaaaaagctgacagttataagtagtaaatgtggacaagacataaatgcaaaattggagaatccttccgcgataagcgcttaagtaagcaaccgattttcacaaggttttgcgcgaatgggaagcgaccagcatctacaggagctgagaatgagcgcgatgaaaccgcagtgaaatgagggtagtgcacgtctggcgatcgtggaaggattctccgattttgttttatacgtaaataatcaattcattacaaatacccaccgtcaaaggtaataacctgcccggtaagataatccggcgcctcaatcagtttcaaaatcatttctgccacttctcccggcgctgcaaaacgtccggcaggaatctcattttccagttccgtccgttcttcatcatcaaagcatgcattcatgcgcgtatcgatcaccccacaggcaatcgcattcacctgaatattacttggcgcaagttctttcgccagtgcccttgtaaaaagattcacgccacccttgctggcagaataggccacctcacaggaagcaccggagacaccccacatagaagaaatattgatgatctttccctgcttttgcgctaccatatgcggaatcgcatatttacagcaggagaatacggaagtcaggtttgtatttatcacgcgattccattcgtcaatgctcatatcctgtagcagaccaatgtgggaaattcctgcattgttgatcagaacatcaatagcatcatgggaatcctcaatctgctgaaacatggctgctacctgtgcatgatccgagatgtcgcaggcaacaggggtacattctatgtgataagtttcggtcagttcttttgcatatgctgtaaggctttccacagaagttcggcagtttaaaaacaggcgaaaacctgcctgagccagacatctggcagctgctttgccgattccatgggaagcaccggtaataagtgctgttttcataaatttatccattcctttttcttatttcttattttaaacgtgtttctattatttttataaagtacactgagcatttttaccaataagttttcctggtatttgtattaaaattcagcaatttacattttcacatttttgaaaatataacataaaaattttagcataagaaatacattgtgtatagagcgttataagaggcaaattttgaaagaaaaacagagtaaaatgctaggaaaatcatagcctaataagatttaaaatgatataattagtcaaaagaaaaagggagaaatgttatggaagtatgtaagatcagtgatgtgatccgggatgcgcggatcagaagcgggatgacacaggaggcactggcatttgggatttgttcagtcagcacgttatcgaaaattgaaaacggtcgacgcatgccacaggtggggatttttgaagcgttgatggatcggatgggggagtcatcggaacgctgtcttgtgtatgcaggggaacacgaactgcaaaaaaagaaactgcaggagc

SEQ ID NO: 13411 - DNA, 2918 bp, Unknown
  gut microbiota DNA sequence
cagataaaaatcccggatgtgcagcaggtttatgagatggagtttccaatatcgacagattcttttgatcgtcaggtggaaaaatttgaggaaaatatccggttgtatgaaggattggatgatacggtggatctgaagcagcatatgacactgatgtactgggatgtgccacagaatgaccgtcttattatcccaattttggaagcaacggatgagcagaaggagcaggtgcagtatctgggctacaacgatggaacctgttccgaactggtaattttttccacctttatgctggaactgggagattattccgtgccaacagcgctgactggagaagaagaggattatacaaacagaccttatggttatcggggcatgaatctgggacattctgttcagaagtatgatctgtcaaaggatgatatcaccgggatcagctattcgttatctgatggggagcttgcgctgacagatgcggtgcagtttgtggaacaacatatgaaagaggattattattttgtaggttcagaatatctggattatcatgtgttacagattgatgtgcggcagctgtcggatgagatctattattatgaatttgatatgggaacttcctatgaggggcttgctttgaattacgatgatgcaacggaggtagagaaggagggcgaaagtgatgatgtgttgaaaccggaggcttttggaacgaatcattttgtgtcgatgtttcagaaagacaggcttggatttatctggagctgctgtcagaatttcgagtctgtaagtgtgaaggaaacatatgagaaaattttaccgttgcaggatgtctgtgtactgctgagcaaatatgtctcagcggataaagtatttcacattagttctgtagagttggaatatcagacaaagtttcagtatgagaatgagaaaaaaaggcaattgggatatgtagagtcagtacagtgccgaccaagttatcatttttccatcaaaaatacgcagctttcagaatttagcagactctattttgatgtggatgcgataaccggagaaattacaacaatgggattttaagttaggaaaacaggatgaagacaatttggcagatgataaaacttaaagttataaataatcgaaaactgtggatttgctgtctgtgtattgtagcaatggcgttattgtgtttcttgagtccgtttccaagtggtgatccggatgaaaaagagaccgtgctgaaagtatggcttaatattgaccgtgagcagttactgcaaatggatgaaatggcaagtatttattctgtggccgcgggatttcgaaacatggagtggtttattgtgctgctgccacttgtgacggtgattccgggaatttttgagttttcggaagtatggtttggtggaaatttttatttgaatgcattgcggggaacgaagaagcagtttgcaagaaaatggctgacagagagtgcatggaaagcgtttttatgtgttggatgtgggattgtgctatatattgtgttggttgctgttaaatttttgccgctggatgcgtatgtaaatgatgtaagcgaaagcatggttgcaatagtttatggagaaacgatgtttcagagaattggctggctgctgcttgcaatcgtgcatacgggactgttgggtgtcgtttttgctataacggcattggttttgacggtgttgtgggaagaaagttttttttcgatcagcagtctggtattgctggaatatttcagtaaaaaaatggcatccggttatgtaggagtcgtatatgaacgttacgaatctggtggactgcctgtaccacttaaggtgcggctggtggagttcctttttccatcaaatcatttattttatgatcattcatttcagtatgcgtttggagtttcttattggggatatgcaatattcatcagtctgtggatgggtgggattgccttattgttttactggcaggtgaggagaagaaatgcgtaagatacatgaaattgtctggattgcaggcatggaatatcgcaagtggtttagtttgaaaaagatgttgatcttattgttttccattctgtttctgggagaatatattttttcaaatatggcgagagtggcagaggagacgggcctttcgatcaatattttggagccaatggatctggtgttgtcctttcagttttatatgctggtgataccgttgatctttattgtgctgttgtctggctttccggataaaagtgggggaaatatttttgttatgatgcgtgcaacgcgtagaatctggctggcagggcagtttttgtttggactgctggctggagttacctgtctgggatccttttttgcagcaagttttctgtggattgggcgtggggctgtctggcagaatcagtggagcggatttatgacagacatttatgaacgttttccggaaatctatggacaaaatgaccgtttgtttttggaatccggaacgatgagtcatggtacgccggtgcgtgtaatgatgatgggtgtgttgctgatgctggcatatttgctggtgatgcttcagattttgtgtctgtttcggctgatggaacggagaaaattggggttactgatcgccatgggaattacagtgttaggcgctacggcagtttcttatataaaatcattaaaatggatttttccgcttacgcatgcaatttttggagaacattttgataggttttatgcgcagccgttggttccgttatggatttcggcattgtattttacagtattaaatgttggattgctatttgcaaatttgtatttggtaaagcggtgtcagattgcagatgaggtataaagattaagattatatcgagtgcactaaaaaagaaacgcgcagcccgtctgagtgtcttattagaagagactgtaattaat

SEQ ID NO: 13412 - DNA, 1073 bp, Unknown
  gut microbiota DNA sequence
tcctgccacatccgtataaatggtctgatactgtccatctgccttatccagataattttcgccagactcgattacaccatatccggcaatcgtatcacagccatacaatttcccgactgcaataactgtatcgccttcggatacaacttttgagccgccaagtgtcgctgtctcaatctgtgcccatacatcatccgcaatattctttctctgaactgcataaacacacagtcccagccctgcatcccggctcttcaagatggcatcgcactgactgtctccggaaaatgtaacacggatgatcttcgcgtcttttaccggaagctctcctgcgaggatcagaagttcctgaccattatctgccacgatcattccggaaatactcttttccttatcttcctgatctttcgaaaattcctcttctgtaacagcgccctgaatctctacaacactttttctcacttctcctgacacctgcttcagattattcagcatttcctgataggtttctgttgtcagaacggttttttgttcctggacttgttcctcttcctgctgtgtctgattttcttcctgctgttcgtcctgtggaattgttacttccgtcggattttcttcaaatctcttctccacccacggtttgcacgcaaaaaaagtaaagcaggccaccagtccgaatattaatcctaactgaatccttctaaggacgtcgtgtttccacttcgcctgatctcctgcctcatctttaataatttcctgtaaaaaagaatattcctcttcttccgagttctgcttttgctctaatggttctttctcatctttcatgcgtacacgcaggctcctttacaaaccttatattcaacaaagaagatatttacagtataccttatccctctgccttcggcaacgagaaaatgaactcggtaccgacaccttctgtactgactacattaatattttcaccgtgagcctgtatcgcctctttgacaattgcaagcccaaggccagttccttttttatcttttccacgggacagatcggatttataaaatctctcccagatcttattcagt

SEQ ID NO: 13413 - DNA, 208 bp, Unknown
  gut microbiota DNA sequence
gttttatatatatcagctataaatttgcatgtcaagagcaggcgaaaaatccgcctgtcttaacctgccgttaaattccttattcgggcaagcgactctcatacataatacttaattctccatatacctgtgcccggttccgaatcgttgtagtccattttttcgttgcttcaaatgtagcaaggtataaagcctttaaaagagctgt

SEQ ID NO: 13414 - DNA, 161 bp, Unknown
  gut microbiota DNA sequence
tcttcggtataatggattcctagaatttcccctaatctaagaccggtttctgccatcattgctatcagcaatcgatctctatcattcgtacaggcatttatcagctcctgtatttcttcggatgttatttcttccagattaggttcttcttctttgaagaa

SEQ ID NO: 13415 - DNA, 403 bp, Unknown
  gut microbiota DNA sequence
aagcgaacatcagcagcaggcgcgcctcgcgcaccgggataccacgctgccgcatatagaagagagcgctttcatcgagctgccccaccgtagcgccgtgactgcacttcacgtcatctgcataaatctccagctgaggctgggtgtacatatgtgcatctcgggtggcacaaagattgcggttggtctgttgcgaactggtgtgctgtgcgtcagggcgcactaaaaccagaccggcaaaggcacctacagcctgctcgtcaaggacatacttataaagctcattgctggtacagttgggcacggcatggtcgattgtcgtatgattgtccacatgctgattcttgtctgcaatggccataccgcacagattcagctccgcatgttcaccggcaagcgtcac

SEQ ID NO: 13416 - DNA, 13862 bp, Unknown
  gut microbiota DNA sequence
ctccctcattaatcaactgtggttgtttttctttgtcaattctattataattatagatagagaaaacatacttgaacagaaacagcttttccaatccgttggaaaaccaacacttttcgataattgtcgaaaaactcaacagcagaaagcggattgcgaatgtccgctttgctttgactaacaccattagcaaacatatgaggtattattatggatatcagaatagaaaaaacaaaaacagcccttcacaatacatttctggaattacgttccagaaaaccattagaaaaaatcacgatcaaagaattgtgtgaaaaggcacagattaacaaatctaccttttactcccattataaagatatttacgatctgagtgatcagttagagacagaagttgtcacctccgtcatagaagccattccgaatccggcgaactgcctggaagatccggcggtcctggcaaaaaatctgtttctcggttatctctcacgtgatagcattatccgtattttattttccggaaccagagccggcgaactggtgcgaaaagtcgaatatcaattaaaaaaaatcctgtttgaagctcacccggagtacaaacaggatccatccgtcaatgtcgtgctgtcttacacggtttatggcggttattatgcatttttcgaaaacagacaatacggagatgctgccgtggttgatatcatcagccagatttcctccggggcaatgaatctgctgtaagttttataaaaaagaactgaaaaaattaccgggagcagacacgaatgattttctatctccgttgcgccacttatttccgcctccttccatgaactcacacgcaaaaccagcgtgttcaaacacactcacggaggcgggctatgctcacttcaattacgaaaatcaatctaccgtcttgctcccggtaatttttttcaattccacttatattaaatatacattaaatcttctctgtccgctgctcttttatttcgaataaaaagcacaatcgatatgattataaacacaattgaaatcagctgcgctgttgtcagtcctatgaatcctccctgttcgttggtacgcagaaattccacacagaatcttccgattccgtaaagcatcagatagagcgcacccacgtcaccggtatgacgcatttttccagtcatgcgaatcagtacaaatgcaatcacaaaatctcctgcggaagaaaaaagctgtgtcggcagcagcggtacgcctgccggtgcaaaactgccttccggaaatacaattccaatcggaaggcttgtttccttaccataacagcagcctgtaaaaaagcagcccaaacgtccaaaagcctgtgccagtgatacggacggtgccagtagatcaaaatattcaaaaaaccggatattcttaatcttacagtaaatcaaggctgataccacaccgaagataatgcctccgtataccacgaatccggaagatccaagtacactcaacggatctgttaaaaactgtttccagctcaaaatcacaaaaaacacttttgctccaaggaaccccataacaacgcataaaattgccagatccagtactgactcggctttcatttccatacgttttgctctataatatcccatcaccacacacaagatcactccgatagcaatcatcactccataagtgtgcaccgtaaaatgtccgatggaaaacaaatctactttcatatcaaaacactcctttaaaaaatcttatctggcacttattctacactattttaatttattttccaactacttcttgtgccaaaaacaggcggcgccgtcatgtaaatggaacaaaataaaaaataactccaacagaaggatgattgtaaaattttcgttggagttattttttatttgtttcttacaccgacagacaaaaatttattgaagagtcacccgtaaagacaccggctgatgatccgtgtactcgaaatcagtgtcgataacctgcacctgatccacctgcagattatcagacacaatatacccgtcaatgacgtacacctgagaatcctcataatttccactgtacggtccattcagcaaccgacacgtcggtgcattatctgccacagcaaaatcaaatccctccggcagatcttctttgtacacagttcctggcacccagctgtccgtatcatggatttcatacttatccacaccttcaaaagtctggttaaaatcaccgccggcaattacataattaccagcctgatattcttcctgcagcttatctgccagcatctggctttgcatcttcttgccttctccgctgtcatatgcttccagatggaaattgatcagcacaagttctttatcagttccttctatcggaatccttgtctccagcatgcagcgtttcagattacaggttttgatcggccatgaaaaagattctgccagtttgatccgctttgcactctccacctgataatccgtcatggtaagcagacccgcttctacttttccaatcggtggaatcggatatggcacaaaatcacatttgaaattgcaggcataaatactgctcatatccaacgcattttcataatactcacgttcattgatatggaaagaacgttttgcatcaatatccacttcctgcaagaaatagaaatctgcattctggcttttcaaaatatcagaaattcccgcaaggtttgtttccaccacatctttgctgtccggctgcaccttacttccaccatccataaagaaatcttcgtctttgctcaatgccgcataaccggtattataggtcaggacagaaaaactatctccttcggataatgtctttgtcccagttcctgtttccggaaactcaatggatttcggacgatattcccgcaccgtataaaaaataagcactgctgctacaaacaatacaatgcataaaactacaatcccaataccttttaaaatctttttccccttcataatgcatctccttctcactattgacctatttttggtcaaaggatattcgcaatccgccttcgctacttgctcataaccaaatagctgcttcgcagcttatcagaaggggcttgcacccctcctgatacaagcaagtccctacccctgcttattgcttttcgcaattgaagcaggggacttccttgatttggttaaactcttaccttttccacctgtcacttatctgtttttattaccataattgtatcctaacatatgcccatctttacatcaagacaagaaagtgtactatcgaagcctcttatgctcaacaaaaaaagagcgccctcgcggaacgctctttttcagtctgttttactgttttttattttcttttcgtttttctgcgtacagtaatcgttattgctccagttcctgtggaaagaatcaaaattgtgatccataacatcattctggcattatcatctgtgcgtacggcttccccggcggttttcttatccgcttcggttttgcctgacgctgatgtcttattaacattttctgcctttgtttcattagaaccagatatcttatccacgttttccggctttgttccgtcagaaccagatggcttatccgaagtatccggctttgattcacccggcacggatatcttatctacttcctctgtttttgttgcgccacaacgctcacagagataagtgcggatacctgttttttctgctgttggcttaatagtgatcactcccacgccccagctatgtccagctgccggaatcgtctgctcatcctttactgcactacaggttttacaatgaatggatttcataccttcatccttgcaggttggctcctgatccacagtataatcagcctcccaatcatggtcttccagtgtgacaaccacagattctgctgcggaccgatttccgtttgcatcctctgccacaagcaacaggaacattccattttcggtacggattgtctgaatcaccggattgccattttcatcataaaccggcattccttcttcatccatcaccatctgattataggtcagatcaagctgtccggaataagaaaatctgccgttttcatccgcagtggcaacctgtttcaaatttccctcccagtctacatcatcaaggcaaaccgttccattcggttctgtcatacctgtaatcgtatagtctccggtatccttattcgcatataccactgtctgatccagactgagcatcggtgcggtatcatctttttccacaagcagatattttgttgtaatatctgtgtaagtacctttattcactgctgcatcaatgcggaacatcacggatcctgtaatatctgtattatcaatgttccaatagccatcatatacagcatctattacctgatcggtatccattcttgtcagtgtataggtaacattttcattttcctgactggtcacttgcagataccagcggttgttatttcctgcacctgccacacaggagaatacgccattttcttctgtgacatcgtgagaagtataattaccacttcctcttgatgtttccatctccgctttcagcgtcagtggtgtgtatttcggtaatacagcatcgtttgattttgtctcctcgctgtaaacaaacgcatttgcaatcttttcacccgtttcatcggtcagataattgtatgcctgtacaccgatcttataattctgacctgctttcagatctgaggtagttgtattgccggaagtattctgattctcatcaatcgcatcaccatttacagtcaatgccatatccagtgtaaatgtaccggtagcagtatcataagaaacaccatcaattttggaatctttgatatcagctgcatcatagctgtaattctttccggtgtcaacaaaacttccgcccttctcctgataaatcgttactctgtaaccgtcagcgtttgccacctcactccaggatccttccatgatctcatttccgatcggctggattgctgctgtcgcaggtgcctccggctgtgcagtattctgataatgaatctgacctaaggccactgtatcaacaggaagaagcacttcatccttttccgtacttccatcttcattttcaatcatgatctcatttttgcttaaaagacttacagtcacataataatcaccggtagcaaccatagttccccgattcggtatctgtgcggatatattagccggatctgtaatatcctgatattcgatggcgtactgtcccttaccgctttcctcgccgaaataagttgccagcacatactttgcatccgcatccggattttctacttttccactgaccgtctgtccgttcaggctcgcagagagactgtcaaatggcatagatgcgttcagattcagattgaactctgccacatcactggttactgtccactgatcaccaacggatgcattttttcccaggccgaccagaacacagtcttttccagccgcattctgtgttgcaaatacattgatttctgactcattggtaatttcatcttcctcattataggaaggtagtgtcagggcaagattgctgccatctttggaaaccgtcaggctctctgcaaatgcctgcatatctgtgccatccgcaggtgtcaccatcataacaaccgtagcatcttttgataatgactgtccctcatttccggtaagttcaatattcttactgtaaacactgttggtacttaccgcattttgcaatgccacatcagcaacggatgttacatttgcaccaagcatatccatatttgcatccatgactgccactgcatcattttcattgtattctgcactgtaaccttccggcttgtgatcttcccacttccattccggcagatctttccagaatccaacggttttgataccagcatcattttccgggaatatgtaccaaaggcgataagatgcaattccccagtcggcttctttcttggcaccgccgtaaattttaaaattcttgaatgcagaatttacagcaccattaaagttcgttcctctgaccggtaccaccgtacttgcaccaaggaaaaaatcaaaacttgtagatccaagtttgacaccaccgatcaacggccatcctgacggtgcatgcagacttcctttcacaccaccgttcatatccgcatttacatagacactggtcggattcttatagctgttcattccggagaacacacttgcacttaagtctcccgaagcccggattaccttggaattctgtggaacacttgcatggacacttgcagcaccaaaagctttcagaccggtgtagtctgtgcccttataattgcgcgtttctccctgaacaccttcttcgatggtaaaatcatcaatcagattcagctttttaaaaattttgacctcatcgctttccagcttaaagtaagccggtccaaaggtataggttgcttttccttccagtgtattcaaaatttcgcctttccctgtaatggaaaggttcaacggcggaattgcaaagaaatctccgttaagggaatctgccagattattaaatccaccaccggcaccggttatatttgccactaccacaggtggcaccagtggcaccttggcaacacttgatcctgcatagaagtaaagcttatttggcataagtgaacctgtcaggttagatctcttcaattccagttccgcctcactctcaaagagatcaaacacattcagttccatagtgaaatgataccttggctggaaggtatcaatttcgccttccagacttgccatatccagtccaagcatttctgtcgtatcaattttttcggttgcacgaataccgtttaccttaaaatctttcccctggtaaccatatccaagctcctgcatggtaaactcagcacctctaaaaatctgaaattctgcatttccttcaaaactgatattgccatccactttcacgttcgctttttccacactgatctctgtacccggaatattggtcgtcatcatcgcatcattcgaattcggatccatcgtcacgatcagaccattttctcccgatgcaatcgtaagattcttctgtgcagcatcttttggctgataaaacttaaatgtcggggtattcagatttacattgcttgtctcaaaacttccatccttgccaacagaaaaacttccaccggcgccggtccagactgcagtaatggattttgacaacgctgccacaccgtttgtaaatacatagcggtcattttcttcatgaaaatttccacgaattgccgcgatctttgttccgtaagtctttgcatttgcatccagctcactttcactggatgccggaactgcctgataaccatccttatttttataaataccaagatgtctggcagactgacttaccgtaatcgtatcattcggtgtaaatgtatcatctttttcggtatagagatcccggtatccccaaagcatgttactgtgctgatatgaaatctcttttcccatgagattcaggttgagttccaatgtcacatcgccactttttgttgcagaaaaatactccggcagtgaatctgtgtaatcacctgttccatcatgccctgtcacataacctgtatacagtgaggaagttgccacaaaaggatttgcccaggaatatccttttgtaaaaagttctgtgatgccttctccggaactgccatagccgctattaggactgtgataccatccaaaagatgtttttacatgcagcagatctgccaccacggcactctctgaatgctgataaccggattccgaatttccggtggcattgctcatgtatacagacgcaccagtggaaacattctcatgtcccattttattaaaaccattcagtttcgtacaaaattgcagattcaggtcatcgccatacgccagaccatctttattcttatactcgacatcaacatctgcttttacaccgtaagttcttccgttatcagcatcatcctctgtcaacataccggcagtcgtgtagccggttgtcttaccttcgtccagtttgacgatccggtaagtcgtggtaacttcataagtacgctgatatctcgatgttacctgtttatacggtttaaactcatattttactgtaatactatttttgtctgcagttacactcctgctggaaacagatattttttctgaatttgcgacaaaatatggatactggtatatttttttgttaaataccatgtcatatgcctcttttgcagatgcttttgttcttgcaggcacagttaccagataaccaccgccaaaatttattttcgaactctgcacaaaatacaggcgaatatgatcattctcgatccaggtaacattataattccggtatgttcctttattgtttgttacctcctctgtttctgaacgaacggatccgacgatggcatatgcatccatcggtacaaaacatgcaagcatacataccgcaagcagtatactcaaaaatttctttatcatagactcatcccctttctttcgtgtcgccatataaattctttttccggtcagatttatatagccatattttaccaaaggaactgatcctttcacatgcccatttcaggagaaaaaagtgcctattgacaaaaaaagaaaagatactgacatctgatacaaatttatttatctgcatctgatctcaatatcttttctgtatactcaaatattcataggtaaaatggattattttgctacgatattgatgattctgcccggaacatagatctctttaatcacgtttcctgtcagtttatcgccaagtgctgccttacctgctgcgatagcatcttctttgctgacatcagccggaagagtaaccacgcattttgtctttccgttgatctgaacggcaagctctttctcgtcatctttcatggcattctcatcgtatgtcggccaagtctcatggaagacagaatcctcatgaccaagctgactccacagctcttcgctgatatgtggtgcaaacggtgccatcagaacaacaaatgtctctaatgtctttttatctacaccgccttttttcgccatatcgatgagtttgttattgtactccatgaatccggaaataacggtattcaggctgaagctctccagacgtgtggtgatgtcgtaaaccagtttgttacgaacttttaccagctcttttgtctctttgacatcagcatctttgttatccagtacaagtttccagaaacgtgtgatgaaacggtatacaccgtcgattcctctgtcatcccactcagaatccagttctggcggtcctacgaacagctcgtaaagtcgcagagaatcacagccgtaatcacgaaccagatcatccggtgagattacatttcctttggatttactcatcttgataccgtttttaccggtgatcataccctggttgaacagtttgtggaacggctcgtcaaagtcgatcacaccgatgtcgcacaggaattttgtatagaatctggagtaaagcagatgcagtactgcatgctcaacaccaccgatatacatatcaaccggcagatatttgtctgctttttctctggaaaccagttctttctcatttttgttatctacataacgaaggaaataccaggaagatcctgcccactgcggcatggtatttgtctcacgttttgcaggttttccacagcacgggcaggttgtgtttacccagtctgtaatgtctgccagcggagattcaccggtacctgtcggctgataagactcaacctccggtaataacagcggaagttcttcttccggaaccggaacaggtccacaatccggacaatgaacgatcgggatcggctcgccccagtaacgctgacgagagaatacccagtctctcagtttgtagtttgtggtagctttaccaatgcctctctcctcgatgatgtgtggagcttctttcttcaaaacagaagattccattccgttccactcgccggagttgatcatagtaccttttgcttcggtataagcctctgtcatattctcgatctctttgccatcttttgcgataacctgaatgatcggaatattgaatttggttgcgaactcgaagtcacggtcatcatgagccggtacacacatgatcgcacctgtaccgtagtcagctaatacataatcagacagccagatcggtacttttgcaccgttgatcggattgatcgcataacttccggtaaatacacctgttttctctttatcctgcagacggtctacagaagatttcagagaagactggtaaatataatcttctactgctgctcttgtctcatcgtttgcaagctcttttgccattgcatgctccggagccagaacaaggaatgtcgcaccatgtaaggtatccggtcttgtggtgtatacagtgatctctttgtctgtatcctcaaccttaaagttaacttctgcaccgtggctctttccgatccagtccgtctgcatctttttaactttctccggccagtcaagtttgtcaagatcatctaacagacgatcagcgtatgctgtgatctttaacatccactgattcaggtttttcttggtaacatcagcgccgcaacgctcacatttaccatttacaacttcctcgtttgcaagacctgtcttacaggacggacaccagttgatcggcatctctttctgataagcaagacctgctttgaacatttttacaaaaatccactgcgtccatttatagaagttcgggtcggttgtgtttacttccatatcccagtcataaacagcagcgatctctttgatctgacgtttgatatttgcaatattctctgctgtggatttctccggatgtacgcccatcttgattgcgtagttctcagccggaagtccgaatgcatcccatcccatcggatgaatcagataatatccattcagcattttatatctgctccatacgtcggagataacgtatcctctccaatgacctacatgcagaccattacctgacggatatggaaacatatccagacagtagtatttcggtttcttaccatcatttacattaaccgggtgttcttcccagattttgcgccatttctgttcaatctctctatgattgtacggtacagccattttcattcctcctaacagattgtccctctttctctttcgtggacatagtctgtagaaattttaacacaaccactgtatttgtcaagttttccgccaatctaacagtcaaaaaaggacagaaatccatgatttatgaactctgtccctctgccttattcttttttcgtattctgttatctcggcgaaccaccatattacataggatacatccaaccatacagccaactgcattgtgaatcatatcatcccattcaaacaatcctcgcaggaaaataagctgactgatctcaatacaggcggatacacagattcctgccagaaacgcctgccagggatggacttttttctttaccatcaatggcagcaacactcccatcggcatcaataacatacaattcagcaaatcttcctgtaacaaggactgatcatggtgactgatcacttcccaccaggaccagaacggaatcagttcgtattgtctggttcctacagaccttgtaaaaacggtagatccatatacaattccaagaaatacaagcaataacaatcctgctgctgcctgaactttatttatttttccacagcggactgcacacacacaacaaaacaacactatcataaaaatactgccaaacaccaggatctcctgaccggaccacattctgttatgtgttataaaaatctgataaatgtccaatcacagttcctccaataaatatattttctttcactctaacctagcaccaagcatattttatctcagtcgcaaaggccgaaattcatatttattttttcactgccacacgacagtcttttttataacacgcaattccatatttcaaaatcgtacgcattccatcttcctgtaatctggcttcatacgatttttcttcaatctgctcaagcgcttttttgcatgccgcatccaaattcccgtcttctgcatatttcacttcaatcacgataccaacgcgacagtcaaaagcctcaatcaatatatcactataaccaataccagattccacattggatttcacgatccaattatccataaacccaaatagtccaagtaaaataccgtgataaaaattctcttttcgttcctttgaaacagcagtgtcacgaatactgattgtattccaaagataatccccaaaaatcttttctacctgagattcatctccccttaacattgccgccgcaaaatcatctaaagttgttttgtctcttccaacagagtccttaaaccattcccgaatctgtgtaataaacaattcccggatttccctgtttggaatagccagccgataacatctgccatcaactctgcctcgctgagtcagatagccggttgtaaaaagtacactccacagattatcaatggtcttatcaagttcatcataagtaagttcctgacgaatttcttttacaatctcttcaccggcaatcaattgctcaatttcagactttgtctgcatatttgctttatcaataaaccgacgtacaatgccatttccacttgtatttgaccagtagtcttccgggaatgcgtctgaatcaacgcgcaaatccctacaatgattgatcacgtcccaagggcaatataccgaaacatttccaaacaaatacccatcataccattgtttcatctgctcataatgttctgaaagtccataatatgccagcatttccttcacttcctcatctgtgaagccaaaacattcaccaaattgaggactcataaccgacaatacattaaaattatttaaaccagtaaatatactttctttggcaatacgcagacaaccagtcaaaacggcaaactgcagaaaatcatttgttttcaatgccaagccaaacaatgcgcgaatcagtgccaccatttccctgtaataaccattctggaaagccttgtccaacggaacatcgtattcatcaatcaaaataacagtttttatcctataatgcttatatagaagctctgacaatatctgtaaagaagatataaggatatcttcactcattacatacttgccatcctgcatagcaataattgcacggtatatatttttgtcttcctctgtcaaattatcactatctaataaaaacgtaaatcgtctggcttctttccctaccaaatcacaaaatcgatattttgcactttcaaaatttaatccttctacacttttcagtgaaagaaaaattaccggaaattttcccatatactcttcacatattttttcattttgtgaaatatagagaccatcaaataatgtcttatctgttccaacttcaaaaaaataccgaagcatactcatatttaatgtttttccaaaacgccgtggtctggtaaaaagatttactttcccccactcttccaacaattgttcaattaattttgttttgtccacatagtaaaagcctgattttcggatttcttcaaaattttctaatccaattggtagttttaatttttcagtcatttctgccccctacgtctttgtagtaccaaacgctttttataaagtctgcactatttttatcttcttctaaaaatcatgtacaaaatcttttctgcttgttttgttgtagtttgaaattcaagcattaagaaattctgtcgatcattttagaataaagactggcttccgcctgttaaaaagaaaaatagaacactaaatgcttacacaaagtttagcatttgtgttctattccgtcaatgacgatttctatatttatctgacggtaaaata

SEQ ID NO: 13417 - DNA, 4364 bp, Unknown
  gut microbiota DNA sequence
tggcaacaacacatatatgaacataccgtttttcataaaaaatgcccgctttcaaataaacagtttttactgtctgtctaaaagagggcatattactcataaatgagccgcttttcatttttctgatattgttttctgctcagcgcttacaaaatcatctgcattgcttcatagttttaagcatgctgaatccaattcatctcagcagagccatatacattacatactatatgatatgtgaaaaaatcggagctacgataaccgtcagaatacctgccactgcaatggataagccgcccatggcaccttcgatttcacccatttccagagctttcgcggtaccaatcgcatgggcggaagtaccaagtccgactccttttgctaccggatgggtaacatggaacaacttgtacacaaaatctgccagcacgtttccaaccacaccggtgataatgataactgcaacagtgatggttacgataccgttcaactcctctgatacccccataccgatcgctgttgtgatggatttcggaagcagggtaacatacatatcatgctccagtcggaagatcagacacagtactaaaatacagactgcgccggtcaaaacccccgccacgataccaccgataatggctttccagtttttcttcaacagctccatctgctcatataacggaattgccagacataccgttgccggtgtcagcagatagctcaaaagctgtgcgccatcgttgtatgtatcataatcaatatggaatcccaccagaatcaggataatgatcacgatggagatcagtaacggatttaacagtgcaaatttcaatttctttttcagcagtacaccaacttcatatgcaaggatactcaccagtacgccgaaaaacatagaattactcagaatgtccttcatttttcttacgctcctctgcttcaatcatcatctgtgttacttttccggatattcccataactgcgatcgttgagataaacatgatcacgataaccggaaccaacactggttttaacttatcccatgcatttaacagaccaacaccagccgggataaacatcatcggcatgatctctatcaggaattttcctgcatcctgaaccgcttccactttcagtacttttgtctctaacaaaataaacatcagcaccagtccgtaaatacttgccggaatcggcagcggcaatacatatttcaaaacttctccaataaaagagataaaaagaataatgacaaattgacgaatatatttcataacaacgcctcttttctctggtcaaaaagtctacattttatggtaactattttttccttaaaatgcaatttcattatctcaattattatatcagctttttcataattttcaatacattggtgctaccaattttagtaaaaaagaaattatttttattttaaatctattctctgtatcactgcaaaattttattcttattctcacctcttaaaatagcatatctgaatgtgtttttaatctaattttctgaaaacaaaatggacacctcatccaaaagtgcccattttcattcctatctcttattaacaaatttcttccatcatttttgtgactaattttcatctgtgatgcttttgtctgtacagtacagtcgccactgaccatatggcaaacaataccaccgacagcagacttgccatcatcccatatttctgtcccggcggatcaaaccgcagatctatcgtatgagaaccggatgagagttttgctccggcaaatgctgtgtttacagtctctattttcgtctctttgccatccacatacagtttcagtccattctgcatcggaatggaagttacaaaatattcatcctcagatgcggtcacattgcattttaatacactgtttttctcccactgatcctctgaaaccagttctgctgcttccacctgcttatccgcaagaagttgacccgggaacacataacatgccacgtcagtaatgtcatagctgccttctgacaaccgcagcataatatatttgtcattgccacgctcttttaacatataggaaaagcaattattttcattcggatacggtgcacttaagcccgacagtttattttttcttccatttgcagagattaccactggtttttctgtatggttgtttacccgaaaccggaaatacaacgttccgttctgcattgcggaatctaatggaatccggattgttcctttatcggtaactttcatttgataaccgttattgattgcctgcacttttacattgtcagagcattccacctcattggaatccagtgccggcaatgaaatctgctccatatcagatacggaaacagaatctgacgcatcttctacaaccgtgtaacgactgagtgctgtcattttctgcgtatcaccaagtgcttcaaactgctgatctgaaatacagtctgaagtcgtatatgcgattggcagcacgtttggattttctgcaattacattttttccctgctgtgcaacgattttatatccataagggattttattttcagtagtcagcacataacgctctgccatcagctgtgcaaacagcggatttcgttcttccaggagtgccgtgcggttgttgatctgaatcggcatcttggtcagatcatagtaaaaattctgatatgcagagttggtcacagaggaatacatagtcgtcgtctgctgtccgtaaaactgcagcgcattgcactctttttttgcatccgtcagcttgttgcagcgatacagcttatttccgcagattgcctgcaactcttcttcggtaaaattctgctcctgcgcctcagaagtcggcattccctgccagttttccccatctgccagacgcacatagatcagaaatggcatgataaacaaaaacagataacgcacaatgccggtttcacatccgatatctgagcatccattcacctcttgttttttcctcaatttcgtatccacaagggcagccacaagcaaaatgccggtatccaatgtcacccaccagaaccatgcctgtccccactgggacgcaatgactccggcaaagacaagaaatatccaaaatctccagcgcacttctccacggcggattttctgaaaaatcttcatgcagtacaaaagaaccaccggtacaaacggaaccagaatttttccccttgcatacagcgttgcatttaaaatgtagggtgccacgccaaacaggcttccaagcaataacagtgctgactgccagcgatattctctgatggtcaatcccagaagcagcaggtacagacaaatcaccgtcaatcccatgccatacggggaatacagcagattctgtgcattcggaagcacaagatccgtgaatgttgttgctttttctccgctgtgcttatgctccagaattgccataaaggtaggcagcaacagcatcattgccattcctatggataaaatcacactggttaccccctgaaacagcagtttccgctttcctgcccagtctgcttcccgtcgtaacattcctaccgcaaaccatccgatcactgccaaacaggcgatcgcataataaaagctatgcagatagatcagtgtcagactgaccgacatcagcgcaaattttcgttttttcaggaagatcagcgccagaagcaaaaatggtaaataattcacaaacataatctggcgatgtgtctggaaaaaacagtttgccagcaaaaacagcatactgccgaaaaatgcgccaaaaggagacataccttccagtcgaagccagtaacgcattaataacactgctgccagataactgcacagtgcatatgccggaatcaaaaacgtcatcggcacctgtggcagcagacatccaagaataatatccggacggaaatacccataataggcaaactgaaatccattattgccgccgccaatgatcatccacgccggtgcaagcgttttttcttccatgcaggtgcggcggatggtttctgccagcgtcacatgctgatcataccagtcaatggtggaaccataaaagcagccttccggcaggattagaccaatgagcaggaaaaacactgccaccagaatcccggtaaataccacattctggagcatctggtttcgcttctcctgctttggttctgttcccgcccaaagactgctctgtttatattttctttgtgtattttctattactctttctttcatttccactatccctcattgctgctttttctcttttccttagcaacacattcagtttagcagaaatttttgaaaatctactatgtgaaattctgaatttttcttaagaacttacaaataaaattcgtgtgaaccttcgtgctca

SEQ ID NO: 13418 - DNA, 2083 bp, Unknown
  gut microbiota DNA sequence
acgatgctatattttaatcgcaaattttgtcaaatacacgcagccaatcagcatattggcagattacatgctcaatgcgatgcagctctgcttccttgctgacacttcgccacagttttttgtaatcatataaccaatattccagatcttccgccagattccattgttcttccctgtgagcattttctgtttcctgatgttctggaattcttttaatatcgttttccatatttatatcggactgtaccgcctgatcctctgctggttcttttccctgtgcctccatcaacgctatgaaatccgccagaactgctccgattttctgtaacaagatcattccctgtaccgcgatcagatatgcccggatttttccccgtcggccaaccggtaaatggctcaccgctgcataaagttcctgctgaatagtttccagttcctgtgctgcctgttgataaaccgccggttcttctatttttaccagtttttcaagttcatctaacagtgcttttctgtctgtaggattccccatctgtgccaatttcaatccatcctgttccagaaaatctaccatattccgccatgtaaacttccagctctctgaaatccgtgccagtacagacgccagtgtttccgtctcatctccgtaagcaactcttgaaatctgacgattgatatcttcaaattccggaatctccagattccacgaaaaagccgctccatagatcattcccggcagactgaaatccggatgattgatatgtccacaatcgccccagtctgtattcaacagaccttctgcatgatagtttgaggcatactgacacattctgctgatattttcataggaaacccgaatctgattcaccagctgatcccatccactgacacccggacagttataaagtctcgctccagcttccgacaattttcttgtagaatcctccggccagtccgcatcatagccccagttcagacaaatggtttctttcggaagttcctgtactgcctccgggaactcacaaatgatatcgccccagaacatcggtgttttacctttgctcaccacatattcacagagttcttttacaaaatccagatacaggcgctgtgttcctttttcttctgccagcgctgcactttttccttttcccagatcaaaagtttcgtccgcacagatattaaaatactgtgaggtaaaaagaggcataaactcgtcaatcagcgcttttaccagctggatactctccggatttgacacatccagagtatgatgccgcatgcgatccacgaatccaaaaggctctttttccattccgggcatctcacacagctcaccatacgtttttgtccgaagcactttatacaagtgaccaaagcaggcaatactcggaaccagctctatatgccgttttctacagtaagcatccagctccaaaatatcctctgccgtcagtggcgtatcatctctccaaacctcagaaaatccccggaacaaaaaggtatgctccatataaagctgtaactggttcagtttgtaaaatgccatgcgatctaccagctttttcaggtaatccatcgtcggaatccttcctcttgtcacatcgtgataaaatccccggtgcaaaattttcggctgatccacaataattgtatacggaatacagcatccgcactgctctatgatctgacgcagtgtctgaataccgtaaaaaatgccgactgcactgccaccggtgatacagataccatgcgcctgaacaagcagtgtatactcctgctccttcatgtgctcgcccaactgtaaacaaatgtccccgttttctgggattccacaactgatagttgtacaaaagcctgcatattcctccagatcctgttgcagtatctgtgcgtcttcataaacttccggcgggcagttgctgttaagcacaattctccgatcatattttagtgtaaacgttccctctttctgataccactgttgtggtcttggaataatgtacatattttttcttctccttaccgcaaatttttcgattctttgttttaaatataaatttacttgttttccttctcctgcatt

SEQ ID NO: 13419 - DNA, 901 bp, Unknown
  gut microbiota DNA sequence
tcaggcgaacctgtgtctctttcagatctgttttatatgtctgcacataaatattgctttctttcgcctctttgctgcttgtaatataatcctgtgctgttccggtgtaagtatcgccgtcttttatcgcacggtcaagagtgatcatattatcctcaaatgtagcacttagcacatagattcctgactgttcataagttttgatcaccttatctttactacttgtaatctccactttatacatcggaatgacctgggctcctgacagtgttgttccgacttcttccgtttttgcaacaccgtagacaaaatcaccatccatgaagccaagtggtttgatacactcgccatctttgcaagtcacttcatattcttgatcagtctccagattcataactgtcacagacttggacttcgaaggatcttctttctcataagctaccagatgtccatcttcgcttgcaacatactgatcttcattcagtcctgtcgcaagctcctttttcgtacctttattcatatccattttgtagagtacgtcatctgcaatcgtatacagacagccattttctacattatagtagaccagtccgtccacttcttccagggcacggtcataagccttgtcactggatacgaataatttttcctcaacagaattctgttcaatattataatagtagactgcggatccagtctcaccctcatggctgccccggttcatatatccgcatacggcaaatgttgtatttcccttttcgtctacatttaaaatcttaatatcatgctgcatcagcatgttccggatatccgtattctcagcatctgcaaagctgaacacaagagaaacttcatctcggtcacgattataattccatagttctcccgcctgcacaaatga

SEQ ID NO: 13420 - DNA, 225 bp, Unknown
  gut microbiota DNA sequence
aaaactgatgcagtaagtgataagccaccaaaaacaagatttgttaaaaaaatatcaaagcttcacaaaaagggtggatttttcactaactttgtggtaatgtagggactgggaagaaatttaattacctgattgtgggtattgcattgtacgcgtacgtgtgttaaagttaacttgtaagatttttcaaagccttagcaaaaagagcgaggaaccatcgaaaaa

SEQ ID NO: 13421 - DNA, 591 bp, Unknown
  gut microbiota DNA sequence
tttttggagaattctgttaaaaaaataacagacttacgatgactttttaccctttcgactgtgttaaaaaaatgacaaaagtaaacgaaaattccttcgaaaatttaggaaaaatgacggaggaagcgttgcaaaaaacaaatgatagtgctaaaatatagcatgtctagcgttgttcttttaacataattactagaggtatattttaaaagtcaagaaggagagaagaaaaaatggcaaagaaagttgtattagcaggcgcttgccgtactgcaattggtaaaatgggcggacagtttggaaatactccggctgttgagttaggatccatcgttatcagagaggcattaaaaagagcaggtgttgctccggaacaggttgacgaggttatgatgggatgcgttatccaggcttcccagggacagaacgttgctcgtcaggcatctatcaaagcaggtatcccgaatgaggttccggctttcacactgaacgtagtatgcggatccggtctgaaatgtgtaaacgaggctgcaaacatgattatggctggtcaggctgatatcgttgtagctggtggtatggagaacatgt

SEQ ID NO: 13422 - DNA, 446 bp, Unknown
  gut microbiota DNA sequence
gtttttatataaaccagataatcttctatcatatccctgctaatttctgtaaaatgctttacttctggaaaccgatcatacataaatctagcaaaccgacggaatccacacaattcgccttttatactacccattgcttttgtctggcagtggctatacaatattctctttattatctctttaaattctctctgcctaatctcacgaaaatctaatctatatcttccacgaatcggattactccttggcacaatatccagctttctcatatcccatacatctttttcattttctggaatatctgctgttttacacttcacaacatactcataatacattttcagaaaagaaacctgagcgctattttgttgctcaacattccgcctatccggtctatttcttctaacgtacagcgccaatccttttttatataaaaatgctttata

SEQ ID NO: 13423 - DNA, 584 bp, Unknown
  gut microbiota DNA sequence
aaactccttcggataattttaagtggaatcagcttggcgaattatatcaatggttcacagatacatatgctcagctgtcactgcaagaattgaaagacagattgaatgagaatatcaactctatttatgcaatgattgattctctgagtgatgaagaattatttaaaccacatatgagaaaatgggctgacgaagcaactaaaacagctgtctgggaagtatacaaattcatacatgttaatacagttgctccgttcggaacctttagaaccaagattagaaaatggaaaaagattgcactataacttccagtttgtagaattcaaaaatttaatatgaaatgtgagatagagcgtatggaaataatctatacgttctatttttttgccttttttgaaaaagtgattaaaaaactattgacattttgttactggtagaagcagatggttataaaaagcttttggtaactatgagtgcaaaaacagatagctgcgaaaatttattatgagctaatagcaaaatttgatattttgtgatattgagggtatggggaatcgtaatctccattaagttcgtcagagaat

SEQ ID NO: 13424 - DNA, 952 bp, Unknown
  gut microbiota DNA sequence
gtctcttggagagatgagacggatttgtctgaaaagataacaaatcataccctaaaaaacatcctgttgtacctttcggtatggcaggatgtttatatatttgtaccgcatataaacagatagtgcaaactattataaaccaatatcacaaccatgaacaaaaagttaatcttatctttagccctatcagggttagtatttaccgctacggcgcagaccactgttgcgcctgccatcccgagagacgagaaaatagaacagcagattgagactttgctgaagaagatgacgctggacgagaaagtcggtcagatgtgcgaactcaccatcgacctcttgcagaaacgcgccaatcccttcgccggtctcgacccgaagaacatcacggtgaaagacctgcaaaaaatcatcaagaaatacaagctggagaaagagttcaagctgggcaaggagatgccttcacaggacgtgatgatgcagctctatatgcgcattcagggcatcgagaatgccaagggcttccagttggacgaggcgatgctcgactctgtcatcggaaaatacaaagtgggctccatcttgaacgtacccaacggtgtggcacagagcgtggagaagtggcaggaaatcatcaaacgcattcaggagaagtccatggaggtgatgggtattccttgtgtgtacggtgtagaccagatacacggaactacctatacgttgggcggtactttcttcccgcaaggcgtcaatatgggagctaccttcaaccgtgaactgactcgcgaaggtgcacgcatctccgcttatgaaacaaaggcgggaagcattccctggacgtatgctccggtgaccgacctcggacgtgacccgcgctggcctcgtatgtgggaaaactatggtgaagacgcctacgtcaatgccgaaatgggacgtgaagcagttatcggtttcc

SEQ ID NO: 13425 - DNA, 1392 bp, Unknown
  gut microbiota DNA sequence
ctaatcgtttgagggcttgaccaaaaggttggattgattcggattctgtatgaagttttgaaggtatatatcttcaatttaatatagggatatagttcagttggtagaacgttggtctccaaaaccaaatgtcgagggttcgagtccttctgtccctgtagtgaacactgaaaagtagaaatgcttttcagtgtttttttgtctgtaaaagtaaatatttgaaataatgtgcaagaatcttctgtgagcaataagaatctgtgttttctgccttttcaaaatgagtaatttagtgtatgatagtaaaaaacaacagagataaaggagaaaacggatgtacgacgaggaaaacaaaaaaacggaaccgtatcaatatggggaaccatatcagtatggacagacaccgccgccacagaatacagggagcgtaaatgatcaatatacgcagcagtatcaggatgcatacagaaatgttccaccgcaggagccggcaggatttgcaatcgcatctctggtacttggaattatttctatcgtattatcatgtacaatgatcaacatcgttactggcattttgtcattgatttttggtattgttcatatagcaaaacatcagagccacaaaggtatggcgatcgctggtattgttttaggtattatctccattgtgattacgattattctgatcgtagtgggtgttacagtgatatctacaccgggctgggatacgatgctgaatgaattataagaagtttcgttaaaactgaatagagcgatgaaaagaaaaagacattctgttggaaaacggaatgtcttttttggagggtatgtaaaaatagtagaacaaatgtcaaaggacatttgaagtttgtattataattaatactttagaagaaatcgtaaaaggtatcacattacaatatttataaaagcgagtttctttatgagactatgaagaaaagtctgtaaataagaatcttctatgataagtaagagcgaattgttcatcttgtgagctgttcgctcttgttttatatatatcagctataaatttgcatgtcaagagcaggcgaaaaatccgcctgtcttaacctgccgttgaattccttattcgggcaagcgaccctcatacataatacttaattctccatatacctgtgcccagttccgaatcgttgtagtccattttttcgttgcttcaaatgtagcaaggtataaagcctttaaaagagctgtatcgctcgggaatacgcttctctgacggtttaatttacggtaagtagaattcagtgattcaatggcattggtcgtgtagattacctttctgaccgtcgcagagaacttaaaaatgggagaaattgcatcccagttatctttccagcgtttcatgga

SEQ ID NO: 13426 - DNA, 2182 bp, Unknown
  gut microbiota DNA sequence
ggagtccatttttcggttacccgatccagagcagccagggcctttttctcgtcagcagcctgatagattgttttcaggtctgttgcaaaggtttttgcatcattatttgaggtatttacgctcttttgtataaatctgcaagaatcttcctgttttacaatccctacaattaatggtagaataaatagaaaatcaaaatcagtcaaaggaaaagaagcagatatgagtacagatgcatgccaaaatgtggaatcagcagaagaaaatgaagtgctacgtgcatggaagttacacatggaacaggtgaaaaatcaaccggaaaacctgaatgcagaattgttgtggcaggtgttatgcgaacttcagaagattcctttttacacggtaaagagcatccaatttacttatagcatccggggatatgagatgtttgtcgaccgaaaggaaaaatcgatcacacaggcaacggttttgctgtcggcacagcgcgtattggaaaagcaaaatcagggaattgcgatcacaggaccgaaaaaaataggtacttttggagcaagttatctgtacccgattttccagcagattggtttgatatcagtcgagtagtttctcatctattgtacgaagagcacagtaataaatttattttaacaaagtgatgttaattcgacttgaagatatataaggaatatgattggaaaaatttggaggaagatgatacgtgaataaaatagatccacaatcctggaaggcggatatgccggatttcagggaaaaaacaaaagcgttttacaatggagaaatgagcaaaggtgactataaaggttattccggtcgttatggaagttatgcacagaaaggcggaaaagcaagtatgctccgtcttcgtatgacagctggtcgtgtgacaaaggaaaaacttgcatttattgcagaatccattcgaaaatataatgtgaaaaaagcacattttacaacttgcgagacgattcagctgcatgatctgcagcaggaagaactgtgtcagatcatggaagatgcgctagatgttggaattgttacgatgggcggcggtggagattttccacgaaatgttatgtgttctcccctgtccggtgtggaagcagatgagtattttgatgtgcgcccgtgggcggaggcagcgggtgagtatctgatgacttttatcaatgcggagaaaatgccgcgtaagttgaaagtatgtttttctaattcgccgaaaaatattccacatgcaacgtaccgtgatcttggatttgtggcaacaaaagaaggaaaatttgacgtatacagcgctggtggacttggcaataatgccagatttggggtaaaagttgcagaagcagttgatccggagatgattttatattacatcaaggcgatgtggctgacgttccgtgcgcatggaaattatgagaaccgtggaaaagccagaacacgatacatgcaggaaatctgtggtggcgcagagaattatgcgaaggcatatcaggaaaaactggcagaggtgttggcttccggagaaaatctgaaaatttctgtagattcgcagccggtgaacaaaaaagaggacggagtacgcatttccggagcacgtattttaccacagaaacagaacggattgtatatcgtgatctggcatccaatcggaggacagccgaaggtggaagaactgtgtgcactttccgatgcgattcaggagatggaagatgtggaaatccgtcttgcaccggatgagacagcatatatcattaatctgactggctcagaagtgggaaaagtgctggatgcaacaccaagtagtgcaaatacagtatttgagacaagcgtcagctgcattggagcatcgatttgtcaggtaggactgcgtgattctcaggcacttttgcaggcttgtgtggaagcagttcgtgaagcagacattccaaacggtgcgttaccacagatgcatatttccggatgcccgtcatcctgtggtacgcatcagactggtgtaattggattccgcggcgcggtaaaacgtgtgggtgatcagccgaaaaatgcatttgtgctgtttgcaaatggtgaggaacgtcagggtgaagaacgtatgggacgtgagattggaactatggaagagtcagtgattccacagtttttggtggaacttggacagact

SEQ ID NO: 13427 - DNA, 1056 bp, Unknown
  gut microbiota DNA sequence
gagaaatatctgtaaggaggaaaacgcgatggagcgtcgggataaaattaattattatctggatctggctgaaattgtgggacagcgcggaacctgtctgcgcagacattatggtgccgttattgtaaaaaacgatgaagttatctccaccggttatgtgggagcaccaagaggcagaaagaactgttctgatcttggtgtctgtatccggcagaaaatgaatgtgccgagaggcgagcgctatgagctttgccgtagtgtacatgcagaggcaaatgcgatcatcagtgcatccagaggaaaaatgatcggaagtacgttgtatctggttggaaaagaagtggataccggggaatatgtaaaaaattccaacagttgttccatgtgcaaacgaatgatcatcaatgccggaatcgaccgggtgtatattcgagattccaaggatgagtaccgtatgattcaggtgcagcagtggattgacgatgatgaatctctggcaggaacatttggatattagagcagatgatatacaaaagtaaatagatgaataaaatcagagaaaatcacagaaaaacgctatttatacagatagaaagttaatggcaactaagaaaaaacaatgcgaagaaactgaaatcgaaattgaaatcaggagaaaaataaggcaggtaaaagaaacgtatgatacaggatattgcaccatttcattttaataacgagtggcataaattacaaccggaggaaaatgactggatcatctgtatgcaggagcggaaaatattgctgcggggaacaaaagaagatatatcttttccacgttatcatgaattaaaggaacaggtgcagaacggagaccggtttgtgtatctgtttgcagttggtgaggaacgatttttcctatatcaacaacatcagtacaaagagcgggaagaactcaatctgatacatctggaacagtcatatgtgaaaaaacagtcaatgaaatttgaggaacaattttgtgcaaaaaaacagccagaaagttctgataagcaatctgacacggaaaaacagcag

SEQ ID NO: 13428 - DNA, 3586 bp, Unknown
  gut microbiota DNA sequence
ccagcacctccttgcatttgtttttatataagatccatacagccgcaaacataagtaacatgccgccgatcatatacaagtaaattccggaacctccggtgtgaggcagttcataaagcaaatcatttgccactgtaatgacgtaggtattatttgttgttttaacctttacatttgtattttctgaaacggtaatacctttatcatttactgttacagtgataggatttgccaacttggtataacctgatggtgctttcacctcagtcagtgtataagtaccataagcaatatcgccttccaagactagaccattggcatctgaaatgtaagttccatttgtatttgtgccaatctttactacttttccattactgtctaccagagtaaattctgcacctttcagataaatatccggtgtaccttctgcatgtcttgttttcagaattttaattttctgagcactcttggtatttgtaatggtgtaacgattaccagatgtactataagttactgtgtatgtcgttccgctgatagttgttgtttcatttgattcaatcatgctgtacttatgacccttataaacaattgtcccgtttgtgtcatccagcttcagctcacgaacaccgccgtaattatctgcttcttctacagtgaaagaaccactgtaatttttcccatttaacaattcaagaatgcgtcctgaaaccggatttccagttttatcaattaattgtactaaaacggtatcctttggatcagtgattcctacccaagtttttttaactcgaatctgttcaacttgaacaactggttttctataagtttctgtaacattgctgtctttccacttataagaaatcgttgctgcgctgtttgaatagaaacctgccttttctgatgatgttccagtttcaactgcagaataaccatctgaagatgcatctgtgtatttatcacctttgttaggataagctgtcttttgatattcatcaaatgcagtctggttaggcacaacatttgtaatggacagataataatagtaattttctttgaacgtgtaactatcttcaaattttagtgttgcggttttcgtatctttattgtaacttaccgtagcaattttagtagtaccttcgtaaacatcaccaccagttaaagaaccctctgttaatgaaaattcacgtccattgcctgacacatttgtgtaaccatttgcggttttctgtgcgatatttactttgatttttgtattagctgttgtatcaacatactgacttaatgtatcagtaattgtaacattcgagcatgccaacgttaagatgtcaccagcaatacttgtaaattctcctgtaagatcggaaggatctgaataattaatcgctcttttggtactcgctgtagttgcgttttttactcgctccaaaatatctaatcctgagattgtttcaaagatatcataataccaataagatcgatcgtagagccaacttccataatattcagattgtactttttgaccttcctccgaacagttttctctatggctccaatatttcgtatcatcatgtgtataaacattaacagagcttggaagtccaattccaactgcataaaacctctcgcacttaatcttaccagcagatgttactgctgcctcaagcgtttttttgcttgtatcatttccatatccagatttgtttgttccatagtaagtcggttttccatctgtcaggaaaatgacaattttctttgcattttctctactactgctatttattgcggtggcagcttgtgataatccctggtcataatttgttccgccatctgcagacaattttcctgcttctttcttcaggtttgttccattaacccaatcatctgtttttgttttagctgatgaactaaaggtgactaatttgtattttgtatctactgtttccttttttgcatcgaaggcatctactaaggcgttaattgccgtctttgtattttctaaattacttccttccatactaccagaagtatcaaccaccaatacaatatcaacaaaagctttttttacatcggagccaattgttccggaagcattcagtgtaatatcatatgtaccattgtcattacgtttgatgtacttttcatgaaacattttgctttcaacagtttcaccggaaccgccattcttagaatagttgtttttaaattctacgctcctggaatttccaactgcaatgttcatatttgtagaagtaattccgcttccggctaccgtactgtctacgaatatagatgtatttctagtatatcctgatacatctaatgtacctgtttcttcgatattgatgtcaccacatttatcctgtggaatatttacaatcgtacttcctctgtaaacaccattttcatatgtccaggtcatatcattatatgataaggttcttacatcacctactttaaacgaaagtttgttagccaatgtctctgcatctgcagcactcaaaccagtaatggtttttgttacagtaacatttgctgtacctgctactggtgtcaatctgtctcgtgtaaatcttacattatcaataaagtttccgactgtagcattattggatgctgtactacctgcaacgaagaagaaacgtgtagaatactgattacttgctacagtataagttccctgatgagttgtccaagaacgatctccgtctctataggtagcaaccattgctcccggatacttttccttattattgacaacgtctaacacctgatcctgagtcgtaatatttttagccagctcactggacattgcaacaacatacattgtatcatattctaccgcagagttatcaattccgttcgatcctcgtgctctatgtgccacctgataatttaaaacttctccaggtgtcgtaaggacatcctgatataatgctccggcagctgcacagttaagttctgcaaactgatttccatctgctgctatctcatctccatgccaattatatctctgatctctgtcactctgacgttttaatgatgatcctaatgtcgtaacaatttcgatatccgcgccttccaaatcagaccatctggtatctgcatcatgtgtacctgttgtctgccaaacaccgtctaatgctttataattttcatttgaaaactgccagttatttgtattctgatgataatccgtaacacttggtgtctcaaaacttccattctgtacttcatagtatccggtcacattatatacagaacttgttgcaagaactgtcgcaccatcgtttggtaatccatactcgttcagattgcttttactataagcttctactgtataagttactaaattatttccattatatccgagtgcgccaccattcaatgctatgtaaagttctttaccgtctgaactgatatcttttccaagatttgttcctgttgtactggaatactgtgttggaatctgtctttccgctgttgctccattaatacttctgtaccaaacatatccaacatctgccgttgtatcactgtaattagctgtcagttttccatagttttctgtaatacttactgttctttg

SEQ ID NO: 13429 - DNA, 1014 bp, Unknown
  gut microbiota DNA sequence
aagatgaaaaataaaaaaatgaatgatatttttaaaaatcttcttgacaattatttattaataagttatcatataaacaataacaattactattattacaaaatggtaacaaagggtaattacttatacatggatactattgtatagaagaaaggggttaattatgccagaattaaaaggaacaaaaacagaacagaacttaatgacagcttttgcaggagaatctcaggcaaggaataaatacacatactttgcaagtaaggcaaaaaaagaaggctatgttcagattgcaagcatttttgaagagacagccaacaacgaaaaagaacatgcaaagatgtggttcaaacttcttgaaggaggagctatccgttctacgattgagaaccttcaggcagcagcagacggtgagaactatgagtggacagatatgtacgcaacttttgcaaaagaagcaagagaagaaggatttgatgacattgcagagaagtttgaaggcgtaggggcaatcgaaaaagagcatgaagcaagatatttaaaacttcttgataacgtaaagaaagaaatcgtattctcaagagatggagataccatttggcagtgtgctaactgtggccatatctgcatcggaaagaaagctccggatgtatgtcctgtatgtgatcatccacaggcttacttccagattaaggctgagaatttctaatttgccgcgcaggcaaagctgacgaaccattgaaagccaatacttcctatttgtgactttagtcgcggcatgttggatgctcacttaaagcactcgtacccaacacttgcttcgagaccacaaataggaggtattggctttcgatgcttctgacagtgactgctggagtaaaagttggccgcgagcattttaagcgggcattcaacgcgccgtgactaaagtctcaaatagggcatattgagattcgagtttcgtcagtgctttgtccattggtttgcaggaaatcagaaattcacaaaaaagcaagg

SEQ ID NO: 13430 - DNA, 12412 bp, Unknown
  gut microbiota DNA sequence
tatgcattggcaaccggaagtggatatcagatcatgggttctttagttggggcgtatctgatgatcttcctgacagatacgtttggagtaccggcaggagctgttggtgtgattactgtagttgcttctgtatgggatgcaattaatgatccgatgatgggaacgattgctgacagaacaaagagccgttggggaaaatacagaccgtattttctgtttattccggcgattttgacggttgttgtagtattattgtttgcaagtccaaatattggaacacatggaaaaatcatatggacagcagtcttttatattttgtacggaatgctcagaactgccattgaaattccaagtggtgcattgatcaatgcagttacagatgagccatcagagagaagcaaaatgatcaatgcttatacaatggtaatgggaatttgcacaacgattgcaacttcttttggtttgtcgctggtttcgctgtttggtggagataatacagcaaagggatatatgatcgttgttggtctggcaggtgttatcatgacaattacatgctggatgtgtttttcaacgacaaaagagacttgtgtacaacataatgagcagaagccgctgatggaagaaattaaaaatttatttcatgtaaaaggtctgttaagtgttattgctgtctggctggcagcatacacagcgtataatatcatgatgtcatcttctgtttattacattatgtactgtttatgcagaccggatttaatctctatgtatatgttggatgtttcactggttggacttcttggaattgttatcattgttccactgtttatgagattattccacaagacacaaaaagcatttgcaatttctcaggttgcagtaattatatgtgatatcttaatcgtaatttttcatggaaacatgacagtattatttgtctgctctggcgttgcatctatgtttgcaacagcatctatgccattcagtgcaatgatgatgacagaaatgacagatctggtattgattaattctggaagagttgtaaatggaacgatggcagctttgaaaggattttccaataaagcaggtattgctatttccagcgcagtcgtaagttttacacttgcagcaacaggatatattgcaaatgccattggacaagagccacaggcggttatcacgggaattacggttgcaagatttgtggttccggctatttgtggagttgtcattattttagcattggtgaaatatccgatcacggatgaagtcagacagaaagtaagagctgtatatgaaaaacagcatacagaaaataagtaatatttagaggaatgaaatgaagttaacagatattaatataagagatccatacatcttgtgtagtggagactggtactatatgtacggaaccagagcagagacctgttggggagcggcagaaggatttgactgttttaaaagtaaggatctggagaactgggagggaccatttgaaatttttcacaaaccggaagatttttgggcagatcgttgtttctgggctccggaatgttatgaaattaatggaaagtattatctggttgccacatttggcagtgaaaaacataagggcattcagattttacagtcagatacaccagatggaacatttcagattatgaccgaaaaaccgctgacaccggacaattggaattgtattgatgggatgctttatcaggaaaagggaaaaatttatctcatattttctcattcttttgaggatgttccggatggtgatatgtgtatggttgaactggaagaaaatctcagttgtataaaaggaaaaattatcacattattttctgcaaaagatgcggattgggctgttccgataccttttgcaaaagctgagtttggtatagatggagatgtatattttacagatggaccagcagtgtatcgtcaaaaagatggaaaaatactgattctctggtccagttggggggaaaaaggttatactgttggtcaggctgtttctgattccggaaaaatagaaggaccgtggagacatttggagcagattgtttttggtccagatggtgggcatgggatgttttttcacacaaaagaaggtgcgttaaaatacctgctgcattatccaaatcaaccgggagatgagcaccctcttttactggaactggcagaaactgagttgggattaaaagcaactttaagttaatgcggtcaatttacctttttagaatttgcatatatattactcaataatttctacttcaactttcgccacaaattcagtttcatttttggtgataaaattatttaccacgtcgtattcaatgtaaagatcactggtcttaagctgatgctgttttttataattcagcattcgttcataagtctcaccgattgtattccaatgaccgacatgataggctgtcagatattttccagcgggaagtatctggcagttttttattgcaggcttctgttccatgagcagagcaacattatcataggcatcgtaaataccatgttccacattttttccgtactgaaaataagcaatatcataatccagataaggattggtcttttgtaacaatgaaatcagcttattgagatttttggaaaaagactgattagaatttggctctgcctctctgtaaagatagtaacagtccggataagtcgtgatttcaatttttgaaaaatcggtctgttccgcaatctgaatcttgtttctctgttgctgcatccattttttcatggattgtagtttcttaatctgctttgcaatctgtgcttcatgttccagaaatatctgctgaaaaagttctggggttcgctgtgaaacatatgtttgaatttcctttaatggcatgtcgagattacgcaaaaccagaattgtgtttaaaatatcaatctgatcgatggaataaaaccgataacccttttcgttaatatatttcggttgaaacagacctatgtcatcataatgaaaaagtgtatgctttgtaatacccatgagctgggtcagttcgccggtggtcagataatctttgcgttccatatactttaacttctcctgtcttgtaattgcaatctataggcatcctgtgattcctatgcattatgtgatttgagtagattataatttgataatgatgtaaaaaatctcctgcagacatgttgtaaaaatctgcttgactatagggttaccctatagtatatgctgtcagaagtcaagatataaaaggtgaaaaagcacatttgtcacgttgtatcatatggggaaaatgtgcagataacggatagaagtattataaaaaagtatgtaagtttgagaaagcaggtgtttttatgagtatgtctttgaaccaagagtttactcctttgaaattgttgcgatttgcggcaccatccatcattatgatgatgtttatgtcgttgtatacgatcattgatggaatgtttgtatcacgttttgttggaagtaatgcattatctgcaactaatattgtgtacccggttgtaaatattatgatcgcaattgcaacgatgcttgcgactggtggaaatgctatcatcagtaaatatctgggagaaggaaaaaagaaagaagccaaagaaaggcttaccatgtttgtggtcattactttaattgtcagtgtggtgattatgctgatcacgctgatttttctggatcagatctgctatctgcttggttctaccgatgaattactgccatattgcagaaactatctgatgattcttgcattttttgctccggcttgtatgttacagtctttgtttcagtgttatctggtaactgcagagcgtccgacactgggactggttctgatcattttagcaggagttttaaatgcagtgctggattatgtaatgatcgtgcattgccatctgggaatcagtggtgcagcgctggcaaccggacttggtcagtcgataccggcaattgcgggattgattttctttttcacaaataaaaagggactttgttttacacggtttcgtgtgaaagttggagatttttttcatgcatgctataatggctcttccgaaatggtatctcagctggcagcagctattatcacgtttttatttaattcagttatgatgcggctggccggtgcaaatggtgtggctgccatcacgatcattttgtatggagaatttttatttaattcctttcatcttggattcgctgttggaattgctccgattgtcggttttcagtatggtgcacaaaataaagctcagctgaagcgtatatataagacaacttttatttttgtaattgcatcatctgttgtgatcactgtgatcgctgcatttctggcaaaaccaatcgtttcgatatttacaaaggatcctggaacctgggaactggcctctgtaggatttcagatttttgcgataaattttctgttcagtggggttaatattgcatcttccggattttttaccgctctgtctaatggaaaagtatctgcgctgatttctttttgcaggacattgctttttaccgttttatttttacttgtgttgccgcacgtactgggcttgaacggtgcgtggatcgcgattccttcctcggaactgtgtacattagtcctgtcagtctgtatgcatgtgaaatattttataaaaaagagtgaaaaaaattatattttgggataaaatgtacgttatgaatgaacgggagaaggaggacgccgtaaaatggcaatccatgtaaaaagcgaaattggaaaactgaaaaaagttatgctccacagacccggtcaggagctggaacatctggttccggaagatctggagaggcttttatttgatgatattccgtacttgaaaaccgcaaaaatcgaacacgatatgtttgcagaaatcatgcggggacagggagtggaagtggtatatctggaagatctgaccgcagatgtactgaaaaatccggagaaaaaggagcagtttgtccgtgaatttattgcagagggcggtgcttcggcagcgaaagtccgtgaccagttgtacgactatctgatgaaaatttcagatgaaaaagaactggtgttaaagaccatgtccggaatccgggcttctgaattgaatgtaaaaatgagctgcccgctggtaagcctggtgaaaaaagaaagtcagtttttacttgatccgatcccgaacctttattttaccagagatccttttgcctgcataggaaacggtgtcagtctgaaccggatgtattcacgaaccagaagacgggaaacactttacggaaaatatattttaaaatatcatccggattttgcaggaaaagtaccgttttactatgatcgggatatggatttttctattgaaggcggagatatcctgaacctgagcaataaagtgatcgccattggaatttcacagcgtaccactccggaagccattgaacttctggcacagaatattttcgtggataaagcgtcagagattgaaacgattatcgcattggatattccggctgtacgtgcatttatgcatctggacacagtatgcacgcaggtggattatgataaatttacgattcatccgggtatcatgcagacgctgcgtatttttgaaatcaaaccgggagatcggaaaggacagctgaaagtaacggagtccgatgcgatgctttcggatattcttgcaaaatatctggaattggataaagtgacgttgatcaaatgcggtggaaaagaccgcattgcttctgagcgtgaacagtggaacgatggttctaatactctttgcattgagccgggaaaagttgtcgtatatgatcgaaattatgtgaccaatgagattttacgtcagcatggcattgaggtgctggaaatggcaagttcggagctttccagaggtcggggaggcccacgttgtatgagcatgccgctggagcgggaagacctgtcaggggggagcttttctatatctacgtcttgattataagcatgatttctaaataatataattagaaaaccattcacatttctttttgtttgagctatgataaacgtatctatgggaaaacatcagaggaagtggatggttttcttttttacaggattacaaaaatgtgcagaagaatgacatacatttttgattataatcttattgttaaaatagcttacagaaaaatgtagggagtgaaaaaatgatcagagaaattaacgtaaaagaattaaccgataacatcagcgagatgtgtatacaggcgaaccattatctgtcaccggatatggatgcatgcatgaaacaggccgttgagacagaaaaatcagagcttggaaaaaaaattctgaatcagcttcaggaaaatctggaaattgcagataaagagatgatcccgatttgtcaggataccggaatggccgttatttttatggaaatagggcaggacgtacattttgtgggcggtgattttgaggaagctgtcaacgaaggtgtccgccgtggttatgtggacggctatctgagaaaatctgttgtaaaagatccgttgatccgtgaaaatacaaaagacaacacaccggcaattcttcatacaaaaattgttccgggcgataaagtaaaaattactattgcaccgaaagggttcggcagtgaaaatatgagccgcatttttatgctgaaaccggcagacggtatcgaaggtgtaaaaaatgcgattctggcggcagtcaaagatgcaggtccaaatgcctgtccgccaatggttgtgggcgtaggtatcggtggaacttttgaaaaatgtgccctgcttgcaaaacaggcgctgaccagaccggtaaatgaacattccgacattccatatgtcaaagaaatggaagaagaaatgctgacaaagatcaatcatcttggtattggaccggggggacttggcggcacaaccacagcgctggcagtcaacatcaatacttatccgacccatatcgcaggacttcctgtggcaatcaatatctgctgtcatgtcaacagacatgcggtaagagaactgtaagacaggaggttttatcatggataaacatatacatacaccaattacagaagaaataactgctgacttaaaggccggcgattacgtttatatcacaggtacactttacgtggccagagatgcggcacacaaacgcatgatggaagtattggatgaaggaaaagaacttccaattgatatcaaagactgcacgatttattatatgggaccgtctccggctagagaaggacggccgatcggttccgcaggtccaactaccgcaagccgtatggataaatatgctccgcgtctgctggatcttggcgaaaaagccatgatcggaaaaggcaaacgtaccaaagaagtcattgatgcagtcatccgcaacaaagcagtttacttcgctgccatcggcggcgcaggcgcattgctttccaaatgtatcaaaaaatcagaaattgtctgctacgaagaccttggagcagaggcaatccgtaagattgaagttgaggatttcccggttatcgtagtcgtagactctgaaggaaacaatttgtatgaaactgcaatcaaaaaatttgcggtagaagattaatcgttataatttttatctcagtcgagaagactcccacttctgcaagtggtgagtaaaaacaagtctttctcagtgggagtacaatctccgactgagataaacgctccgcgtggatgtgcagtgattctgaaaagaatatgtcagctttcgctgaccagaatcatgcaccaagtctcacgtgcgttcgacttgaatttacggttgaaaaaatgaggtgtgacaatgaaagttttggtaattcccgatgttcatttaaaaccatatatgtttcaacatgccgctgcactcatgcatcagaagattgcagatcgcgtagtctgtctgatggatctggcagatgactggggaaaggaatacgatgtttccctgtatgaagaaacatatgatgaagcaattaagtttgcgataaagtttcctgatacggcatggtgttttggaaatcatgacctgagttattattggaatcagttagaaaccggatacagcagcatggcatcctataccgttcagaaaaaattacttgatctgcgttcggttgttacggaaaataatccgatccagtatgtgcaaagaattgataatgtgcttttttctcatgcaggtgtgttgaatgactttgtggaaggatatgtcccgaaagcaaaatacgatgatgtggatgcggttgtagaggagattaataaactggggcgaacggagatgtggaacgatgcatcaccgatctggctcagaccgcaacattcgaaaatgaaattgtataagccgcgtaaattgcttcaggttgtagggcatacgcctgtggagggaatcagcagagccggaaatctgatttcctgtgatgtattttccacgcgtagtgatggaagtccgataggcacagaagaatacttgctgttgaatacattgacgtgggaattttgtggaataaggacaacgtgatgtcgttacgcaaaagctgagagcgtaattttaggcttttcatagagctttattggtgctacaatgaaaaaggatgattcgttcgaaaagagggcttctgcttgcagttgcctaatccacgacacttttttcaatagcgtaggcttagcggtgcatttcgtgtgattgcggattgtccgaaaaagtgcgcagccggaaacggctgcgtattttttagtttgacaggaaagtttgtgggagttcatgataaattatttgagaatgattgtagagtatttcatgaatcaggaggaaagatacatatgaaaatagctgtttactgtgcatctgaatttggcaaagaggaactttatacagaagctgcaagaaaactgggacagtggatcggagcatccaaacatacgctggtgtatggcggtggtgagtctggtctgatgggaacggtggcaaaagaagtgcacgatgctggttgtgaagtgatcggcgttgttccgggaaatgttgcttttattaaaaatcgtccgcagccttatgtgacaaagttgatcctgacagaagatatgagtgagcggaaacggaaaatgctggaactggcggatgtatttatcgcacttccgggtgggatgggcacgttagatgaaatatcagaaacgattacgttgacgaagatcggagtattccataagccgagtattttgtttaatcgcaatggattttatgagccgttgaagcagatgtttcagacgatggaagatgcgggatttttggcagaagataaaatgaaacatgtattattttcggatgatttgaaggaaatggaaggctttttgcgggaatggctataaaaataagctgtgatgattacaaatttttgcgataaaaaatatttcgtggttaaaaccacagatttttctctaaaaacactgtatgctaagtacatcttacaaaagagaacaacaataaggtacaaaagatatgttttttaaattgaaaaaacgaaaaaatacaaataaaaaagcgaggaacaaacttatggtaagaagaattattcatattgatgaagaaaaatgtaacgggtgcggcgcatgtgcaaatgcctgtcatgagagtgccattggcatggtaaacggaaaagcaaaactgcttcgtgacgattactgcgacggtcttggtgattgtctgccagcctgtccgaccaatgcgatcacatttgttgagcgtgaagcagcagcgtacgatgaggcagctgttctggcaaacaaagcaaaaaaagatgcagagaacgcgaaatcagcaggaacttccgcaccggcacatgcaccgatggctggcggatgcccgggcacacggatgcgtatgctgaaccaacgtctggaagagactggggagagcgcaccggctgcaccgcagcagagtgtttcccgtctgggacagtggccgtgccagatcaagctggttgctccgaatgcaccgtatttcaatggtgcaaaattactgatcgcagcagattgtaccgcttatgcatatgcccgcatgcatgaagatttcatgaaaggcaaagtaactctgatcggctgtccgaaactggatgatattgattatagcgaaaagctgacaacgattatttccaataatgatattcagagcgttacgattgtacgtatggaagttccgtgctgtggtggtctggagtttgcagcaaagaaggcattacaggcaagcggtaaatttattccatggcaggtagtgaccatctccattgatggaaatattttggattaatcagtaagagaatatcaggtgtgagctgattttcattaaaaataactgaaaaagaaaaacacgcaaaaatgacttatattgtcacgtttgcgtgttttttggataaaaaactggataaattcgatcataagtgatactgtgaatttacaaaaatcagctgatctttcgtaatacacaataaaaataagattctgtaattgtttgtcaaaaatctggtatagagcaagaggtattatagaatcatacatgtaaataaggagaagaaaacttatgatctggtttatcattgcaacactggttgcattttttatcaaggggttatgcggctttgcgaacaccctgatttttaacgggattttaagctacacggcaaacaatattaatatttcaccgttagaagtagtgttggggtatccgagcaatattattttagtctggaaagaacggaaatcgttgaactggaaaatctggcttccactaaccgctttggtcgtggcgggcagcattccgggaatctttttgttgaaacacacagatgctggtctgttgaaagtgatttttggcatcgcagttattatcattggcattgaaatgctgtttcgggaaatgaaaagcagcaaaagtagcaacaaaaagtccggcggttccaaatttgtattggtactgattggaattatttccggtctgctttgcggtctgtatggtgtaggtgcactgctggcggcttatgtgagcagagtggcggaaaacagtcatgaattcaaggcaaatatctgtgtggtatttgtggtggaaaatacgatccgtattattttgtatgcagcgactggaatcctgacacttgcagtgcttaagcaggtcgtgatcctgattccgtttatgctggcagcagtatttcttggaatgaagagcagttcggttttgaatgagaaagtcattaagaagattgtgattgtgttactgattctttccggaatcgtgctgatcatcaataatctgtaacttttatataatcttacgttttttcaaaatccagaactccacggcgatcacgccgagactgatggcgattaacaacggatagccataacgggcttccagctccggcatatgggtaaaattcatgccataccagccggtgatgacggtgagcgggaaaaagacagaagtcagaaccgtcatcagctgcatggttttattctgtttgtgatcggattgcgcctgttcaaaatcccgcagggtctggcagtaatcaatcgattgctgcgccacctgctggagacggcaggcgcggtcgccgatgagctgaagcagctgcagccgttccgggtcgaaataatttcggacgttgccctgcagctgtccagccatatcgtcaatctgttcataataattgcgcaggcgggttaactcccgcctgttttttaataaccggggcatcaggtcgtggatattgccccgcatggcattttcttccagcaaaaacagtttgcgttcataagattctaacagttccatatcatccgtcagaaattccgagaaaaatccatacaaaaatagttccggagacatttcctggctttcgtaacggtgaatcatcgtttcaataatgcggtcaggtacagaatcatccgatacaaataccatacaggtttcattcatataaaacgtaaagcagagtggcgattctaacagtcgtttgcggtcgggaatacacatgcttccggagatgtaatggggatagatctctgctttgcagctgcggatgatggtgttttccagaccagcgtaggatggaaaatgcagggatgctttttgctgttcccattgtgccggggagagtgtcagcacggtttctatgcaagtggaatcgtttgaagttgaatctgaagatgatgtattatgtcgaatagagtctgtcaggtcagagtcgtgttgaatgggattctgccttgacaagtttaaatccggtttaaaatcaagttctatttttcttagtcgctgatgtagtgtgtaatacataaataactccttatgaattgttttgctaaattttgttatggaac

SEQ ID NO: 13431 - DNA, 16431 bp, Unknown
  gut microbiota DNA sequence
tttccatagtgagtgcatatctttgcagtatgtttgtcgtagtgggagctaaatgtagactgagggaaagattcctcttggttagaatatccgaaaatctcagattttatcagtggattccggcaaaaaccattgcatatttatccagattcggtataattaaagaatggtttactgtgcggaagaaccgtgcattgaaaacctgtctgatgaatttggaggaaatacatgtcacaagcagtagtcataaaaagtaacaaatatggaatcaatctgatcctggacaaagacatgccgtttcaggagctgttgactgcaattaaggagaaatttcaggaatccgagaagtttttcaaaaatgcgaaaatggcgatttcttttgagggacgtacactcactcaggaagaagaatatcagatcatagagaccattacagagaatacaagtatatcgatcatctgtattgtggataatgatgagacgcatgcggatctggtaaaacagcagattgaagcctattacgattcggtatccggcagagaaggcgaattttaccgcggaacacttcgttccggacaggtgctggagagcgtatccagtgtcgtgatcgtcggtgatgtcaatccgggtgcgaagattatctcacagggaaatatcatagtgcttggagctttgaagggcaatgcctatgcgggagccgcaggagacagcaattgtttcatcgtggcacttgagatggatccgattcagattcagatcggagatatactggcaaagagcccggacaaaaagatgaaaccgatgcgcagactgcgtcggaaagagaagaatccggtaattccggaggcacagatcgctgttgcaaagggcggcaatatttacatagagccgatcacacgtgcaagtttgaacgattataccaaataagaaatgatgcccgtttttgcaggcgggaaacaagtaaaagtatggaggactggatgcaatgagtgaagtaattgttattacatcaggaaaaggtggtgttggtaagacaaccactaccgcaaatgtgggtacaggacttgcccagctgaacaaaaaagtcgtactgatcgataccgatatcggacttcgtaacctggatgtggttatgggacttgagaaccgtatcgtatacaacctggtagatgttgtagaaggaaactgcaagatcaaacaggcactgatcaaggataaaaaatatccggaattatacctgcttccgtctgcacagacgagagacaagacatccgttactccggagcagatgaaaaaactgaccgatgagctgcgtgaggagtttgattacatccttcttgactgtccggctggtatcgagcagggatttaaaaatgcgatcgcaggtgctgacagagcgattgttgtaacaacacctgaggtatctgcaattcgtgatgctgaccgtatcatcggacttcttgaggcaaatgagcttcagaagactgagctgatcgtaaaccgtctgcgtatggatatggtaaaacgtggcgacatgatgtctgtagatgatgtatgtgatatccttgcaattccgttgcttggtgcagttccggatgatgagcatatcgttatctccaccaatcagggtgagccgctggtaggaagcgactgtctggcaggacaggcttattccaatatctgcagaagaatccttggtgagacagtggaatttttaaatctggaagaaaaacagaccgtgtttgacaagctgaaaaacttgttcaagaagaactaggagggcttttactatgggatttatggattttttcaaaagaaaaagttccggggatgtagcaaaagaccgcctgaagttgttacttgtatcagatcgtgctaattgttcaccggatgtgatggagctgatcaaaaacgatatcatcaaggtgatttccaaatatatggaaattgatgcggaaggattagatatccagattacacagaccgaatccgacacaggaaacggaaccgttccggcattgtatgcaaatatcccgattcgtgatatgcatcattcgccgaaaaaagaagaaaaataatgactggaaaaaggaactctggttatcagggttcctttttattataggaaaattcagataactatattgaaaaattatggtaatccatcatgaaacaagcccgcctacagagaataatacatactttattgtctatgttgcgtaaagaattacagaaacgttgtgcaaaactaataaaaacgaatcgactgattattgtaaaaagtcacaaaatttttgaaaatatatacaattcactgacttcttttgcgaaagtgtggtatactatatatacaattgctgaaaaaagagaaatggctaacaatttatttccacacacaagttataaaatggaagtttccatttaaaatgagaagaaaggagcgttgtgtatgtttgaaaaaggggaatatgtcgtttatggaagtaagggtgtctgcaagattcaggatatttcgcacgtagatattcccggtgttgacagaaatcgtcttttctatattatgcatccggtgcagaatagtgagcagacagtctatctgccgattgacagtaacaaggtaatgatccgtaaagtaatgactccggaggaggcaaagcgtctgattcaggatattccaagcattgaggttttggaagtaccgaatgagaagcagcgcgaagccagctataaagccgctctgcatgagtgcagcggccgttcctggatcagcattttaaaaacactgcaccagagaaaggacgagcgtctggcagcgggcaagaaggtgacagcattggatgagcggtatatgcgtgtggctgagcaggagctgtacggggaattgtccgtggtacttggaatagaaaaagaaaatatgcatgattatattcaggaacatattgcatccgcttaaatgcattttcaaattcgagagttagagaggatgctattatagtagtgatgatcttaatgatacttattattataataaaagagatacaagttatatagagcagagaaatgtcaagataaagtcgaagtttggctttatcttcttttattttacgaattgcgcgtgtgaactgtaacactgtaactattttactagccagtttacacatcatcttacatagtatgcgaacggaaacttttctttataaataaaaagtgctatactgtttaagctagtgccctgaaatctgtcagatatgaggaagaaacttatgtctgtgctaaaatggttttgcgccgaccggaacggagtgtagagtgcagtgattctgaaaagaagatgtcagcttgcgctgaccagaatcacgcaccaagtctcacgtgcgttcgacttgaatatgggcagaatagaagtatcaaaggagtacataaattaatgggacagaaaacaaaagagagcttttttacaaaagacaaaacattttaccgtacgttgtttccgcttttgattactgttgcgttacagaatattgtggcatacagtgtcaatatggcagacaacattatgctgggtagttacagccagaatgcattgtccggcgcagcgacggtcaaccagattttctttatggtgcagcagatcactcttggaatcggagagggatttgtcgtgttgggtgcccaatactggggacagcagcgtatgcagccaattcggaaactgactggtatcgcgttaaaactgggactgatctgtggaattattaccattttgatctgcaccttcctgtcacatcaggtggtatctatttttaccaatgatccggaaatcattgcagagggtgtatcttaccttggtatcatcaagtatactttcctgctgtttattattacaaacgtgctgatggcggcgctgcgttgtgtggaaactgtaaagatttcgttctatatctcaattgtttccctgatcgtaaacgttggcattaactatgtattgatcttcggacgttttggcgtaccggagcttggaatccgcggtgcagccatcggaacactgatcgcacgtattgttgagctggcaattgttgtgatctacatgctgaaagtcgataaaaaattaaaattgttcagtgaaaactttatgaaatttgatgcagcactgcgtcaggattatacaaaggtagagattccggttatgttatctcaggtgctgtgggcgatctccgtaccgttccagaccgcgatccttggacatctttcttctgatgcgatcgctgcaaactccgtagctactaccttttatcagtatttgaaggtaatcgttgtagcaatgtcatcttcctcagcagttatgatcggctctgccgttggacgtggagatatgaaacgaatcaaatcggatgcacgtacactggcagtcatcgatgtgctgatcggtgcggcattgggactggcgctgtttttactgagaaaaccgctgctgacactgtacaacttgaatgattctgcactggtgatggcagatcagctgatcatcgtcatgagttttattatggtgggaatgtcctatcagatgccggtaagtatgggaatcatccgtggcggcggagatacaaaatttacaatgatgatgaacatgatcagtacctgggcaatcgttattccgttgtccttcatgagtgcgttctggtggcactggtctgttgtcggcgttgttattatgatccagtccgatcaggtatttaagggattgccgacgttcctccatttccgcagttataagtgggtgaagaagctgacgcgtgaagacgcataaaaagagataagataaaataagttttcctatgattttaaaagtaaaatcacgatatcttaagaaacgccagtgaaaatgtatgatataatgagcgcaagagagtcaacatgcttgcatgattgacgaccggcgaatgttgatcataagccggttttgcttatgatataatgagcgcaagagagccatagggagcttgatcacttttggcgaacggcgaagtgattgagtgatgaaatcacgaaataatgagcaaaatcatattagcatgcttgtaatacgagacacatttttacgaagtactgaaaatccccgaaaggagttaatgtatggcaacgaagaaaaagaaaataaaatcacatgtgaaatatgtcaagcagcagcaaaagaagaatccggtttcggaagaaaagtatcagaagcgactgaaagtagcccggaaaaaagacaacatgcgccggttgagaaattttttcattattctggcagttttggtcctggcactgtttatcggtggaaatgtgatgctgaagaaggcaaccggacagacactgtttggctgcatgaaagaggcaaaggaactggtagatgagagtacaccggagacgttccgtctggcacagacttcttatatttacagcgatgacggcactcagctggcggctttgtcagaagatgtggatgccacttatctggaatacgatcagattccggcagatgtagtcaatgcatttgtggcagttgaggatcgtactttctggaagaacagtggtgtggatttcaagggaattgtccgtgtctgtttaaattacgtcaagtcaagaggacaggtggcagaaggtgcaagtacgatcacgcagcagctggcgcgtggtacgttcctttccaacgaaaagacattatcccgtaagatcaaagagatttttattgcatgggaactgaacaaaaaatacagtaaagagcagattatggagttttactgcaacagctgttgttttgcaaatggtatttacggcgtggaagatgcgtctcagaaatattttggacggtctgtcaatgatctgtccctgtccgagacagcatatctgtgtgcgattccaaacagaccggaatactataatccactgagaaacagtgaaaatgcgattgccagaagaaataagattctggaagatatgtatgagtgtggttatattacaaaagaagatggcgaatctgctttaggagagaatatttctgtagcatcagtcagtgatgaagatgacaacttctataattatgaagtaacttatgcaattaactgtgcagtacgttatctgatgaagctggatgggtttgaattccagtatcattttgatgacgatgaggattataaaacatacaccaattattatgacgaagcatacaagcaggcaaaacataaattgtatacaggcggttataaggtaactaccaccatgaatctggatgcgcagaagggcttgcagaaagttctgaatgaacagctggaaagtgatgatgaggtggatgaatccacaggcatttatgcactgcagggtgctatgacagtcattgacaacgaaaccggaaaagtagtagcaatcatcggtggacgttctcaggatgccattcagcagacctattctctgaaccgtggtttccagagttatatgcagccgggaagttcttttaaaccgctggcagtttatacaccggcattggaagaagggtatacagcaaattctacattgacagagattgatgtatccagtgcaaagaaatctacttcagcagaaattaagaaaatgggtggaacgaaatacagtttacgccgggcagtagagcagagttacaatggatgtgcgtattctctgtttaatgagattacaccaaaggtcggactttcctatgtagaggatatgaatttctccagaattgtagtatcggatgattataatttgagtgctgctctgggtggtctgacaaacggtgtcaataccgttgagatggcaaatgcatactatactctggagaatcatggtgagtatacacagacagattgtatttcttctattctgaattccaatggtgacgagatttatgaagatccaaccagcaaaaatgtatacagccagtctgcagcagatcagatgacagacattctgactggtgtgttaaagcgtggtactgcggaagatttgaactgggacagcgcttctgatgttgaagcagcaggaaaaacaggtacaacaaataaaaacaaagtcggatggttctgtggctatacaccgtattatacgatttctgtttatgtagcatatgacgatcagcgtgcaacgaagagaatctggggacattcttatccggcaaaagtttggaaagaagcgatgcttttcatgacagaaggtctggatgcaaaagattttgatctggacacaaggcattcatccggcagcaaggatcaggtttatgattttgatgactccgattccagtgcaccggcggagaacgacacaacaaatcaggctgatcagacgcaggataatacaaatcaaggcgatcagaataataacaacaatacaggtattgatggaaatattccttctgagacggatggtatcaatggaggcaatattccggattcttccgattccaataccggagataatacgggcggcaatacaggcggcaatacaggcgatacttccggtgacaataaaggagatagttctggtgacaatacgggtggaagtaccggcgatactactggcggttccacaacaaatgacggcaatacaaccggtacagacgcgaatcagtaaattggatggagaaggaaatggcagatagttatagggtaagatcattaaaaaaaccggcgcagtggacggtagaggttccggggtctaaaagtattacaaaccgtgcattattactgtcagcactttgcaaaggtcatgtgtatctgcatggtgtgttgttcagtgatgattccagacattttttgagttccctgcagtcactgggatatgatgtacggatcgatgaaggacaacataccgttgaactggaaggatgcggaggtgtccttccggtgcaggctggttccatttatgtgggaagtgcgggaaccgcagcacgttttctgacggcaatgctgggcgtatcggaaggaacctttgtgatcaacgcatcggaacagatgcagaaacgtccgatgcagccgctttttgaggcactgatcagtcttggtgcatccgcggaatggctgggagaggcatggcatcttccggtgcgcatcacgggagcaggagcgcagatacggagtctggagcaggaagcggtgctgaatctggatatcagcacaagtacacagtttttaagtgcatttttgctgatcgcgccgatgtttccacacggcatacgaatccatattaccagcgagaaaaaggatggttcctacattcgtattacgaggaagatgatgcaggaatttggtgtggaagcaggatttgacggctgcgattatacagtagcaccatttgatggttatcagaaaacagagtatcagatcgaacccgacgtatccggggcatgttacttttatgcggcagcagctatgagcggcggcagtgcaaaagtaaagcatgtacactgggacagcatgcagggagatatgaaattcctgaagctattagagcagatgggatgcagtctgacagaagaagcagatggaatccgtctgacaggttcagtggatggattaaaaggtctggaagtgaatatgaacgatttttccgatcaggcattgacgttggcggcaatcgcgccatatgcttcatcttcggtaaaaatcacacatgtgggacatatccgcgggcaggaatgtgatcggctgcatgcaatcgtaacgaatctgagaaatgccggaatcacctgtgaagaaggggatgactgggtgtgcatccatccgggtaagccacagccttgcaagattgaaacctttgaggatcaccgggtagccatggcatttgctgtgatgggacttggtgcagaaggtattgagattttaaatccgggatgctgtaaaaaaacatttgaaaacttctttgaggtgctagatggcttgttgaataagcagtaatatagatgtccttgttataatgtgtatgacatttgagtggtgatctgaaaaaagatagtaaattgttaatttgttgacagaatctgggaatgggtgtacaattcaaaacgatataagaagaaatagttctaaataatatcgacagaaatccaaaatcaggtattatgaattggcatcggtcagcaatcgtgcagacatgccgaaaatgtcagagggaggacaattatcatggcaagaagaaagacatcaaatgtacatacaacaaaggcaacaactacagcagctcagaaagttgaggcaacaaaagcagttgtagaggagaaagctgtagaagtaaaagaagctgtaaaagagacagcagcaaaagcagaagaagcagcgaaagaaactgtagagaaagcagcagagaaagctactgaggcagcagcagaagtaaaagagactgcagagaaagccgtagaaaaagcggctgagactgttgagaaaactgcagaagcagcaaaaacaactgcaaagaagacagctacaaaagcaaaagctgctacaacgaaaaaagctacagcagcaaagaaaacagtaaaagcaaaagcggatgctgtaaaaacagagactaagaaaagagtaacaagaaaaccgaccaagaagatcgtattacagtatcttggtaaagagtttgatgaggctgaattaacagagcgtgcaattgcacagttcaattctgtagagggtggcgtagcagtaaaaacaattactatgtatctgaaaccggaagaggatgcagcttactatgtaatcaatgaccagtatactggtcgcgtagatttctaatatctagtttcgggtaattgcgtagtttaaaatgtaagttatgaaaagggactctgctattttttcttgtccgctaacaatcgctggacaagaaaaaatagccagagtccctttctttttgtctgtgagtttaaaccacactgcttacccttacgttgtgacacgaagtgcagggtggcgcaaaaatttaccaattcatatcactgtgtaaattaagaacgtctatattttttctcgaggagcgattgttagcgactgagacaaaatacagacgttcttttattaaaagtaaatttggtaaattttaagccaccctaatcttggccttgtttgatttccccacgttcgcaacgatttccccaagaatcaatgagttccccatcgcggtaaacgcagatgatctcacaatggtttgcacaattcggacatacaacttctcgtgtcacaaattccatatctgccacatcaaagctgaacggtttctcaatgccgcatccgagtgcaaggatcgcagcaccgtaacatcccatcagatgtccgttttcatctacaatgatttcttctcccagagagtctgcaaaggcttttacaacgccttcatttttactaacaccaccctggaatacgattggcggaaagattttcttaccttttccgatattgtttaagtagttatttgcaacggcattacacagaccggcaatgatatcttcttttttgtgtcccatctggattttgtgaaccagatcggactctgcgaatacggtgcagcgggctgcaatcggagttggatttttacttccaagagcgatttttccaaattcttctacttccacaccaagacgacgggcctggctggagaggaaagaaccggttccggcagcacacagggtattcatggcataatccacagcgacaccgttttccacacagatgatcttggaatcctgtccaccgatctcaaggatggtgcggacatccgggtgcagggttgtggttccaaccgcgtgtgccgtgatctcattttttacaatgctggcgttgcacatagcgccgacaagtttacgggcacttccggttgttccggcagcaacgactttatattcattctgatcaattttttctccaagggctgcgattactttttttgcagcgcccatcggatttccctccgtccagagataaattccagcgaggatgtttttttcttcatcgataatgacacctttggtggaaatagatccgatgtcaattcctaaatatgcttttttcaagattctgttacttcctttctcatggcgatcatatcataaaatgcttccagtctggtctcgataccggtatcactggtctgagtatcatagtttaagtacagcaccgggattttgtagtcggagctgatgttgtggagtaccggaacggcatccatctccggtgtacaaccgaaggattttacgtgaaccagtccgtcaaagcctttttcggcataatgctctgccagggcgatggtggagatactggaacttcccatgtcaaatttggtgtatttgctggaaagctttttctggatattgacccagagggaagatgggaatttgtacaggtcgtaggtgaggtagccttttaattttttcagggttccctcatccggacagagcagcacactgttggaaaggttcatccagcgatgtacttccgcacccatctgtgcgatttttttctcaatttcatgattagaataaggatccataatggtgaaatattcaccgaccacaccgacacgcagcggatgttccggtttgtttttcggaatagcatcaaaatctgcgatggtctgtttgtaaatgcggttgacatcccttaatccctttgctttgcgaagctgtgccagaaaacggttgtatactttatcataggagcctttttcaatttcaaatcccatgttctgacggtagttgtcttccactttatcgataacggtgatcattctggcagtggcaggcagcgcttttaccatctgaagcatggatgcatttggggcaaactgtctcatgccttttaacatgccaatcagatttttgtagcgaaagagagtcagattgaacatgtcaaaatcgtatcccatatcctttaatatctgttcatgaagttcaccgtagtagcccagacgacaggttccgccggtctggatcagaacgttggcaccctgctctaaggcttcgatgtaacagcccatcatacatttgaatggtgcacagacgaagtccggactgtattttgcaccaagttcaatggttcgttttgtcatggcaggcggagccagatattccagatgcagaccgttgtttacaaagtactggatcggaatgtcatagtttcccaactgcgggtaacagagtttatatttcttttccggcattacagacgtgcctcctttcggaaacggataatatcaataaagctttccagacgggtttcgataccggcgtttccgtcctggctgtccagcagcaggttcaggatcgggcggtctttgatccggcggatgatcatctcgttgaccatggaatcaggtccacacgggaatgcggtaagcaggataataccatccacatcgttgtgatatttggaaatcgatccaagcagctcgcggttcatgatccacggaacggctttgcagatattcagggaatccgtctgagcctgttttaaatctacggcatcggaacagatcggaacggcatccagctgttcgattcccttcatgatcggttttccgatatattcatcgtagaggttgtagctgtgtccgacgacaaggattttgatgcggtcatcgtgcagttttgcttcctcttcctgaatatgtttctcatgtgctttctgccatgcggcatatgctttctgataagcttcttttgcctggctttctgaagctccaagggaaacacccagcatcatgtaagcctgttcctctggacatttctgctgaagatccacgttgcaggtgataaatttaatatcatgatcgcggaaagtgttggctgccatatcatacagcgcttcaaaacgggagcacatcacgccgtcttttccgtagtttgcgatacgcggaacaaagactgcgtcacattttccttccagtgcggagacatgaccgaaaaataatttgctggagaggcagttttcgtcgatggcgtagtgactgcctgcatccataagtgtcttatttgtatgtgggcttgcaatggtctcgtgaccaagttcccggaaaaaagtttcccagagaacatggtaacgataataaagtaaagcccgtggtattccgattttcatattttatatacatccattctttttaaaataattcaggtaagcggcaaacagtttttcatccaccggtgggcagctgatgccggactgattcagcaggagatttgctttggtacagtcatagaccgtgtctttgccgatgaagtggcgcaggacaccagggttggcgtcagtaccgctctcaaaaaggcaggctaacagggtcagggcattttctgatgcatccgcctgttttaatttgcttttccatgccgggaatgaaatataacggactggatagccgcaggcgcggatataagaaactgcctttttcaccggaaccggctccgggttgaccagattgaatgcctgatccatggcttccggtttgcgggaaatgcagcagatcgcatttgccacaaaatctaccggcgtcatatgcatgcagtagcttgtgcgtgggatcgcctgcatctggatcgttccgacgatcatacggctgaccatgtcatccatttcccagatgccgttggcagcaccggtgatatcgccaggacgatagatcacagtgtgaagtccgcgtttctgtgcaattcctaccagtttttctgatacccattttgtctcagaatatgcaagggagaagccgtgagcggtgttcagcggatcgttttcatagacccgtttgcccttgttatttggcgtatcataaacgctgtaggaagatacatagtgataatattttggctgaccggcgcaggcaaggcgcagggtttccacggttccgtgtacgttggtttctttcaaaaactcatacgggaacacaaaattcagcaaagcaccgttgtggtagatcacctgaattttttctgtcagctcctgccacagctcttcggaaagaccgaatttctctgtggagagatcaccaatgaccggatgcagaaatgcgcggtaagattcatcccaacactggtaatggatcatgttgttgatcagtcgttccagaccggcttcttcggagtctgcacgtactagacagtacagattcagtccgtcatgcggatattgcgtcaggatcgcacggatcagctgagctcccagaaatccggtagcacctgtcagcagaatatttctgcaatcctgtggagccactgtgtaagcatttgtcggcgcaatggaagcatcaaggttacattcctgttccagatcgactgctttggaagctcctttggcaccggctaatgtgcggcgtacataattagcaacaccggacacggaggaatccagcagtacttcacgtagatccagttttacatggaaccgttcttcaattttacttaccagctcaaatcccatcagggaatcgccgccaagctctaagaaggaatctgtcaggctgtactgttcgatgttcagcactttttcaaagacagcttttacctgcagcagaatctcatctgctttgtcaatggacttatcaatgattgttgtctctgagctgccagtgcggtatgcatggctgctgtggagaatttttaattttccctgctgatacagatctcttgcttttaacatctgcagtttactgttgtctgtacgcgggattgctcctcttggaacaaaaataatgtcatagaaggagaagccgaagcgcgcggatacagctgcgttgatctgactgacccgcttctggaaatcttcttctggtttggattcaacgacagcgatcacctgttctttgtttccgttattcgtggagaaaaatccaaaagaggttgtagcaagcgctggtactttctgcatgatcagcgcctgcagatcacttgggaagatattgtgtccgttgatgatcagcatttccttgattcgtccagtgatatacagatgcccctcatataaaaatccaaggtcacctgttttatagaagttacaatcatagccttccagtttgacgcggaaattagcattttcttttaaattgccccagtagccgtttgctacgctgtcaccggaaataaaaatctctccgatatgcaggtctgaatatacttttttggttttgggattgccaatgaccacagtcagatctttgactggtttaccgacactgacaatttctttgacctgtgtacctttcggaacttcgtccagaacgatcgcgcggtttttctgatatgcttcataatccagctttaatacacggtaatcctgactggcaaaggttgcaagacagacattttctgccagtccgtagcccggtgccatggcattcggggaaagctggaacagttcggaaaatttttccacggtttcggcactgataaattccgaaccgttcataaaatgagttacctgtgtcagtggatattttgctgcttcctccggtgtaaaaatacgggtacatgcatcaaaggcagaacctggtccgacagtcagagtcagattgaaatcatgcagcatttttacccacagctttggattttccagaaactgtaacgtagagagaaaataagcacaggcattggtggtgcagatcggcatacagatcgtaacgaccagtcccagattgtgaaaaaacggaacccaggtaccaagggtaccattgttaaaatcgtagcatgcctgacactgttccagatttttcatcagtgctttccatgtgacgcggacgcctcttggtgcgctggtggaaccggaagtgtactgcaggtaaaccagacggttttccgttgcttccacgatcacgtcttttcgtttgtatggagtcagacgatccgtgtagattcgttttaaacggatgacactggtaaatgcctcgcggatcagacggccggtgatgctgacaccggattcttgttccatggcatagttggaaatcagcgctttcggctgacaggatttcagcacagagataaaacgtgctacttttccttcgtccagtggcggtgggatgacggtgaatgtgacacctgccatcatacaaccaaggatcgcataagtagtaccataatcctgcatactgaaaataaccgcccggtcaccagggcggagtccttttttgcgcagcatgtacgcaatttccaatgatttatggtagagggcacgcattgtgatattttgcatgtcccattcgccgtttttgtattccagaaaacggtagatgacacgttccggagctttttcggtctgcgcggaaaggatgtcaatgagtgaggttatttttttcataatgatatactttgctcctctgtttttctgatggatttcagaaagtgttatcctatataaataatgggttttatcttatacatattatataagatagtttagctttataatagtt

SEQ ID NO: 13432 - DNA, 529 bp, Unknown
  gut microbiota DNA sequence
aagttaaataagtataaactctttgttgtgtctttttttgcaagatgaaaaataaaaatttacaattttattatagattaataaacataaaatatagtataatgttggtattgcaatataattaaaaagtaaaggaatgttatgcctgaaaacaaggcagctaatacaaatgtatggaggtatgatatgaaacaaaaaaacatggacaaagagacaagaatcaggaaagcacaggagcgcacagatgagttgtttccggggaaagatctgaatgacatgtatgagatgtatctggaatttttcgcggaatatgaacggttgtgggatgaaggaaaaaatgtttccatggaaatgctggagttcctgaatcgaaacaaagatctgatcgagatcattgattattttccacaggaagacgagcctttgtgggaggagagccgtcgtgtgctggaacttttatttacaagtgatgaactggattaatgcggagttgcttttggggagctgttatatcagatgggagatgact

SEQ ID NO: 13433 - DNA, 166 bp, Unknown
  gut microbiota DNA sequence
atgggtggtacacattccgtacctctatgttcagatgatccgtgcggctggggcatcactgcgactttcgcacccatcattttcttttattgacccggcagccacccgctctcccatgccgtctccagcatagtaccataggccgcttaggtcttaaccatcgtgt

SEQ ID NO: 13434 - DNA, 275 bp, Unknown
  gut microbiota DNA sequence
tactgagaacatcagtactgcgtccggtttggatgctaactggctctgtaagtctgttacgatcttgtctgccgtaaactggttatctgctacatccacttttgcccctgcaactgctgctgctttctcatctgcatgtacgatgatgtcaagcggatatgcacctgttccccagatgtttgccgcgatggtgtatccatcactgctgccctctgattttgctgagctgtttgactctgattttgctgagctgtcaccgcctgctgctccgttgt

SEQ ID NO: 13435 - DNA, 621 bp, Unknown
  gut microbiota DNA sequence
gaaaattcactttatttttttcagtcctgtctgcagcagggcgtttccgcagaattacatatttacccggtgggaggacacggactttctcttgcaaatgaagaaacctgtcgtgccaacggtatcggtgtgcagaaagaatgtcagagctggattagtctggcacagatttggttagaacatatatttgaaaactaaaagagattgttaaaaactcagaaaaacgtctgtgatgtggtaactttgaaaaaatttaaaacaggaagtgaacagttggaagtaacagagcgtttgtttaggttttggaaaagaaatactcataaaaaattaagttgagatattattggaagcatgttagaatcttctaggcataaaaattaagtagttaataaaaactaggaaggaattttaatatgttaacaatgattgaagtattaaaagcaatattgtttggtgtagtggaaggtatcacagaatggcttccaatcagtagtaccggccatatgatcttgcttgacaaattcgtaaaattaaaagtgagtccggaatttctggatctgtttctggtagtgatccagctgggcgcaattcttgcggtagtagttatttactggaacaagt

SEQ ID NO: 13436 - DNA, 734 bp, Unknown
  gut microbiota DNA sequence
atgttttacttttgaaacagcgcatgtgaacggtcataaatttatctgtaaaaacggataaaaaatattgaaaaaaccagttgacgttgaaaaaaaagtatgatatagtatcagagttgttgaagacaaagtagagtatccactctcacctcggcgcgaatgagcgaccggcggttattattcaaatacttttgatttgattgtggatagtctgcctatccactttttttatggaggtgcaaaaccattagcgatttaatgattaatgaacagatcagagacagagaagttcgtgtaattggtgcagatggtactcagcttggtatcatgtctgcaagagaagcgttcaaactggcgcaggaagcagagcttgatttagtaaaaatcgctccgactgctaaaccgcctgtttgcaagattattgattacggaaaataccgttatgaaatggcgcgcaaagagaaagaagctcgcaagaagcagaaaactgtggagatcaaggaagtgcgtttgtcaccgaatattgaatccaatgatttaaacaccaaaataaacgcagccagaaagtttatcacaaaaggtgataaggtgaaagtatccctgcgtttccgtggacgtgagatggctcatgttcagaacagcaaacacatcttggatgattttgctgaggcgctttctgaaatagcgacagtggagaaggcaccgaagatggaaggccgcagcatgacaatggt

SEQ ID NO: 13437 - DNA, 52954 bp, Unknown
  gut microbiota DNA sequence
atttaataattcttttgcatttttcagaccggatgcaacagcaactttgacatccataccagctacattgtaagtagcctctttgatgccctcgataccacgtacatcagtgaactccagttttgcaagttcttcaccggtcagtttctctactgcggtacgaagtgctgcttccattacaccaccggttgcgccgaagatgactgctgcaccggttccaagaccaagcggcatatcaaattcttcatccggaagatctgcaaaacgaatgcttgcgcgttcgatcatgcggccaagctctcttgttgtaatagcaatatccacatccggaacgcctgcaccgttctcatcgtctctgccaatttcaaatttctttgcagtacatggcataacgctgacaaccaccattttttctttcggaattcccattttctctgcgtaataggattttgcaatcgcaccaaacatctgctgcggagatttacaggaagacagattctctgtcatttccggaaaatagtgctcgcagtatttgatccatcctggggaacaggatgtgatcagaggtaacactccgccattctgtacacgatccaggaactcgttggcctcttccataattgtaaggtctgcagagaatgtggtgtcaaatactttatcaaaaccaagtctgcgcaatgctgctgccagcttgccctctacatctgtgccgatcggcatgccaaaggcctcgccaagtcctgcacgaacagcaggtgcacactgaacaaccacatacttctccggatctgcgattgctgcaaatacttcttcgatattatctttctcatacagtgctccggtcggacatacagcgatacactgtccacaggatacgcagcttgtttctgccagatccatatcaaatgcagttccgatgtatgtcttgaatccacgctcatttgcaccgatcacacctacgccctgtactttttcacagatagcactgcatcgtctgcaaaggatacatttgttgttatctcttaccatatgagctgcactggtatctaactcatacccattgcgttcaccatcatagtaagcctcatcatctattttatattcacggcataaggtctgaagttcacagtttccactgcggacacaggacaaacatttgcggtcgtggttggataataaaagctgtaacgtttttcttctggactcgataaccttcggtgtgttggtccatacttccattccttcgttgatcggatatacacaggcggtcaccagagtgcgggcacctttcacctcaacaacacacatacgacaggcgccgatctcattaatctctttgaggtaacataacgtcgggatttcaatctgtgcaaggcgtgctgcctccagaatcgtggaaccctgcggtgcggatacctctcttccgtttattttaattgtaatattttccatgattgattcctccgttactctttataaatagcgccaaaacgacacttatcgatacaggttccacatttcacacatttgcttgtgtcaatgctgtgtgcaacttttacctgaccttcgatggcattaaccggacagttacgtgcacataatgtacaacctttacatttcacaggatcaatcttatatgtaataagtttcttacatacgccagccggacatctcttatttactacatgctcaatatattcgtcacggaagtaacgaagtgtggaaagaaccgggttcggagctgtctgtcccaggccacagagtgcgttatctttgatgtaatagcacagttcttccatcttgtcgatatcctctaaagttccgcgtccgtctgtaatcttctccaataactctaacagacgttttgttccgacacgacatggggtacatttaccacaggactcatctaccgtaaactgcaggaagaattttgcaatatcaaccatacaggtatcttcgtccataacgatcagtccgccggatcccatcatggaaccgatgctgatcaggttgtcgtaatcgatcgggatatcaaaatgctctgccgggatacatccgccggatggtccaccggtctgagctgctttaaatttcttgccatttggaatgccgccaccgatatcttcgataacggtacgaagtgtggttcccattggaatctcaaccagaccagtattgttgatttttccaccaagagcaaatacttttgttcctttggatttttcagtacccatggaagcaaaccattccggtccgttcaggatgatctgtgggatatttgcccaggtctcaacgttatttaaaatggtcggtttctgaaacagacctttgacggccggaaatggcggtctcggacgcggctcaccacggtttccctcgatggatgtcatcaacgcggtctcctcaccacagacgaatgcgccggcaccaagacgaagctcgatatcgaagttaaatccggtatcaaaaatatttttgccaagcagtccatattctcttgcctggttgattgcgatctgcagacgttctactgcgatcgggtactctgcacgtacgtaaatataaccttgatctgcaccgatggcgtaacctgcaattgccattgcctcaagtacaacgtgtggatcaccttccagaacggaacggtccataaatgcacccggatcgccctcatcggcgttacaacagacgtatttctgtacgtttccacggtttcctgacgcaaatctccacttcagtccggtcgggaatccggcaccaccacgacctcttaaaccactgtctaaaatggtctggataacctcatccggtgtcatctctgtcagtacttttccaagtgcctcatagccgccggttccgatatactcatcaatgctttccggattgatgacaccacagtttctcagtgcgattctgtgctgttttttataaaaagttgtctcatttaaggatttgattccttccggagtctgtgcctcatggtacacaagacgctccacgatacgaccttttaacagatgctcagaaacgatctcctccacatcttccggacgtactctggaataaaatacagcttccggataaacaatcataaccggaccttctgcacacagaccgtggcatccggttttgacaactgctacttcattttgtaatttatttttctttaattcatcttttaaagtctgaataatctgctcgcttccggaagaagtacatccggttcctccacagactaatacatgtgaacgatacattcagttacaccccccattacatattctcatccatgtgaagtaaatatttgtcaaccacctgacctctgaccagatgccgctccacaatttcttttgctttttcttcatttactttcacataagttactttttctttgcccggctcatagatttctacgatcggctcatactgacataaaccgatacagccggtctgggtgacaatcacatgctccagatttctgtcttctacttcttttacaagtgtatttaaaaccggacgcgcaccgctggcaatgccgcaggttgccatgccgacaaccacgcgggtgtcttttgcatgttctgaacgcattccgatctgtccctgcattctttcacgaattgctttcaattcttctaatgatttcatatgatccctccttcgaattaccccgggtaattctgcattcgattaatatccgcttcattttcttccagataatctctgagaaaagatgatacctccggcgttgaaaacggcacattgccaagcatttcccgcatttcttttgtatccaaatgaaactctgcaccgtttacctgatattgatagtaaaaatcaatgtccggatgcatcacgatcagtgaataaaccgtctcattgagatttccaagcggcatacagtcgatactgtcggtacaaaagaccgccgtgatctgtgtaccttttcccggtacagaagaaatggaaaatgatccgccggtacactccgcttcctgcttgaaaaacggaataccaagtcctacttttcgggtcgtccttgtggtataaaaaggatccgtcacccgattcaatgtctctgcatccattccttttccgttgtctgtgatctgaaccatcagctgattttgctgcgtgttcacacagatcacaattttaatttctgtcgctttcgctgatacggaattttctgagatatccagaatgtttaatgatatttctggtaacattacatatatttcgccagaatgccatctaattcatccggagtcagacgaccatatacatcatcattgatcatcataaccggtgcaagaccacaggcaccgatacaacgacaggcatccagagaaaacttaccgtctgcggtacactcaccgccggcgattccaagaatctccatgagcttgttgtaaatatcacctgagccttttacataacaggccgttccaaggcataccgaaattttgtactgtcccttcggatataaattgaactgagagtaaaatgttgctactccatagattttttccatcggcacatccagttcatctgagatcattttctgaacctcatatggaagatagccgtaaatgtcctgtgccttctgcatgatcggcatcagacagccctgatcattgcgcagttcgtcgatgactgcacgcagcatcgcttcctgttcctgtgttccgttgaacggaacggattttgtttttttcaaaattatccctcctaatatccaatgtattttttgcaatacatctgccatttatactatcatccaatttcacaataatcaacaaaaaattgtggttagttttgtataattttgatacttttttcaaagaaattgtttaatctgcaatacacttgcaagtatgttataaaaataacaagccttttttgttgaaatatcacaaattgcatgctatactaaacccaaaaaattgtgcatttaaaaaaatacaaattttaaattttggaggctactatgacaatctcagaaatcatttttctgctggatgccaccccattatctcagacggtacagaccgatcataagatcgaaacggtatgcggttcggatatgatgagtgatgttctggcttttatcaaaaaagatgcactgctgcttaccggactgaacaatctgcaggtgatccgtactgctgaaatgctggatatcgtctgtctggtctttgtgcgcggcaaacgaccgcaggaggaaatgttgaaaaaagcggatgagcttggtattacggttctctccacagactacaccatgttcgatgcctgcggcattctctatcacgctggattacggggaggaagccgccatgatgcctagtatccattatcaatataccgtagacggagaagattttaccatggcaggggaagccagcagttccctgaaacagacattaaaaatgatgaatttgaatccagatgtaatccggcgctgcgctatttgcatgtatgaaggagagatcaatatggtcatccatgccaacggtggtgtcattgatgtggatatttttccagaccggatcgttatggtattaaaagatgaaggaccgggaatcccggacgtagagcttgccatgcaggaaggctattctaccgcaaatgaagacgtgttaaatcttggttttggtgccggtatgggactgccgaacatgaagcgttcttcggatgaaatgcggattgataccgtcatcaatgttggtaccaccgtcaccatgaccgtctattttcaggcaccggaagtatcaagtaaaaattcaccgtcttaatttgattaagtttgtaggaaaaaggattgttattatatcatgaataaattttttcattcagtatatctggaagatgagaaatgtaccggttgtatcacatgcctgaaacgctgtccaacgcaggcgatccgggtacgaaatggaaaagcacatattatcagtgaattttgtattgactgcggagaatgtatccggcattgtcctcatcatgcaaaacataccagacgtgattttctcagcgatctggatcgttttgaatataccgtggcacttccggctccctctctttacagtcagtttaacaatgtacgcgacaacgacatccttctgactgcactgactctgatgggctttgatgatgtttttgaagtcagtgccggtgcagagattgtttcggaattatcacgaacttatattaatgagcatccggaacttcatccgctgatcagtaccgcatgtccaaccattgaacgactgatccgtgtccgttttccgggattgatcccgcatctgctgccactgcttccacccatggaagcagctgcgattctggcgcgccgacgtgcagtagaaaagactggcttaccggaagataagatcggtatcgtttttttgtctccctgtccttccaagatcaccttcatccacgaacctcttggaatgggaaaaagcaatattgacgcagtacttgccatcaaggatatttatccggtactgctctcccacatgaaagaagccgaacagcacccgatttcccacacgctgtccggtcggatcggtaagggttgggcgatcagcggcggagaagcttacggcatcatatccgatcattatctggctgccgatggcattgaaaatgtcattcgggtgttagaagatctggaagacgaaaaatttctcccgggactgcagtttgtagaattaaatgcatgcagcgccggctgtgtgggcggtgtattgaccgtagaaaacccttacattgccaaagcaaaagtgaaacaggcattcaaatatgaaccagtgttgcgcatgcactgtgcggatctgccagaatttcgtccagaagattttctctggacacaaaaagtcagctatgaacctgtgtatacactgggggccaatatttttgaaagtatggaaaagattatggaaagtcagcagattttaagtggacttccgggactggactgtggctcctgtggttctccaacctgcaaagcgctggcagaggatattgtaaaaggcgtagactgcgcaaaaccagaagactgcatctatctgatgcgtgaacaatgggaacaacattcccgcaaaaaggaggaggaagaatcatgaccgtaaaagaattgacagaacaatgtccctttgaaattgtacatctcggaaatccggatgccgtactgacagagccatactgctgcgatctgctgagtatcgccatgggaaatgccccagccggttctgcctggtgcaccgttatgagcaatatgaacacactggcggttgccgctctggcggaggcttcctgtgtcattttatgcaacaatgtatctgttggtgataacatgaaattaaaagctgtcagcgaaaatatcaatgttcttcggacgcctgactccatttttacaactgctctggaggtttataaaaaactgcatgaaaacgctggcttatgatctgcatctccattcctgtctgtccccctgtggggataatgatatgacaccggcaaatatcgctggtatggcaaaaatcatcggactggatctgattgcactgaccgaccacaattcctgcaaaaactgccctgctgtcgctatcgctgctcgggaatatgggcttctgtttctgccagggatggaattgactaccgctgaggaagttcatgtcctgtgttattttgcatcgttggatgcggcaatggattttgatcgatatgtatcagaccatctgccagacactccaaataaaccgatgttttttggagatcagttgatttataacgaacaggatcagatcagctgtacagaacagcgattattgatctctgccacagatcttccctttgatgccatttatgatctggtaaaccaatatgacggcattatggttcccgcacatatcaataagccaacgaccagtttgcttggaaaccttggatttatcccggaaaacagccgtttttcctgtgtagagatcaagcaggaaactgactgggcatccttacaacagcaatatccttatctggcaaattgtaaccatctgtgcagttcggatgcacatgatctgaataccattcatgaaccaatttatacgattaaaacagcagggactacgctaccggatattctgtctgccatacagaaaaagctgtaacagaagatatatactcttttataggtccatatatctttgttacagcttttcttgttacacttatacttttttatataacattcatgtacagaatcattttatccatgaaattccagaatctctcgattatttctggtaatatacaaaaattcaagtcgaacgcacgtgagacttggtgcgtgattctggtcagcgcaagctgacatcttcttttcagaatcactgcactctacactccgttccggtcggcgcaaaaccattgtctcccagacaatgtgcgccctcgcggagcatttatctcagtcggagattgaactcccactaagaaatacttgttactactcaccacttgcagaagtgggagtctcaactcagactgagataaaactctaaatattcttcttaatttgtactatcgcatccaaatccttatttaatgactttcttaccgtatttctcacccagattttcaattgaaccatcttcattctggatattgatctgatctaactgactgcgcagatttctacggaaagaagctacatattcctcgcgtaatacggcctgctcctttttctcagcttctgtcaaaccttctgcttttgctttatgatataattcattaattctttttactttttcatctgtcatagacatagttatgttcctccttttctatcgtaataaatataagttttctggttaataaactgataagatgccaattcgcaacaactattccagctccatgaaatctgacttcacacagcaccttatctcctaattttcctgtaaataagtatgaatatcaaaggtttcgtcattctgcgctctgaataaagtacctctgaaatctccgctgataatctgatgaataattcccacatctttaccgttggcaataatcatatcagtgccggatgccgtcgcaattcgtgctgctgtcagctttgttgccattccaccggttcccacatcgcttccggtagactgttttgccatagaatcataatgctcattcatcttttctacgcattcaactaaagttgcttccggattttttcgtggatcatcagtatacaatccatcgatatcggacaacaggatcagcagatctgcgccaaccagagatgatacaatggcagaaagtgtatcattatcaccaaaatgcatctcgtaagtagatacggtatcgttttcattgacaaccggaataatgcctaaacggaacatttcctcaaaggtattgtgcgcattctgacgggactcatcctccagaatggtatcctttgtcatcaagatctgtcctgcggtctgattatattctgcaaacattctctgatatgtcatcatcagtcgtgcctgtccaactgccgcacatgcctgtttggtagaaatatcctgcgggcggctctgcaaaccgattgcctgacgtcctaccgcgattgctccggaacttaccaggcagacatccatgccctgatttctcagatcacagagttcccgcaccagtttttctatcttcatcagattcatacttccagtctgtggatgctgcagagaagacgatccaattttgacaactactctctttttatatttgaaataatcgtttacgttcatttgtacactccttttgtcatatcctcgcaaaacaattgttgttccactttcaggtgctttttcagctttgacactcttgtgttctatgatacatcggtaaagttctttctgtcaatactcatatcttccagtccttatgtgttgcttatctgctatttaacaaatcccttagaatatctgtatcagatcatcaacgtacaaaaatactgccctgaaaactcagggcagcatttgcatttttactattatgaagtttgatccaattaagcagtaacttttctgcctgtgatgatcttcttcggacacttctcagcacatgcgccgcatccggtacattttgtctgatcaatatgtgcgatattgttctcaacagtaacagcgcctgactcgcagactctctcacacattttacatccgatacaaccaactttacaagcagtcataacctgtttacctttatcctgagaactacactgtacggcatgttttgcatcatacggtacaagctcgattaagttcttcggacaagctttgatacattttccacaggctttacactgctctttgtcaactacagcaacgccgtttttgatgtggattgcatcaaacggacaagctttcacacactcaccaaatccaagacatccaaaattacattttttcggaccaccgtttggtacgaaagccatcatggagcaatcctctactccatagtattcataatctgtatttgcattttcacatgttcctgcacattttacaaatgcaacttcacgaacagattcgccaacttcctgacccatgatcgcaccgatcttagctgctaccggagcaccgccaaccggacaggaaccaacctctgcttcaccttttgcaattgctgcagccagaccggaacatccggcaaaaccacagccaccacagttatttcccggaagagctgctaatacttcttcctctttcgggtctacttctactttgaatttctcaccggcaatcccaaggataataccaatgacaatacctgttccgccgactacaacagcggcaagaataattgctgaaacactcatctgtataccctcctaaatgacaccggaaaatcccataaatgcaattgacatcagacctgctgttaccagcacgattgcggaacctttgaaaggtgtcgggatatcattgtactcgattttctcacgaatacctgccatgatgacaattgaaatggtaaatccaactgctgttgcgaaaccgttgattgtacttacaccaataccataaccatactgtacgttgttcagggcaacaccgagaacggcacagtttgttgtgatcagtggtaagaaaataccaagtgcgttgtacagtggcggcattgattttttcataaacatctctacgaactgaaccaatgcagcgataactaaaataaatacaattgttcttaaatatgtgatatcaaactgctgcaggataattttatccagcacgcttgtgataaaggatgcaattgtaataacgaagataactgcggcacccattccggctgcagtatttacctttttggatacaccgaaaaacggacataagccaaggaactggctcaggacaacgttatttacaatggcagagccgattgcgataagtaatacttctttcatctgaacctttcctccttattctttctcatctgttcctgcagtgaacactttgccttcacagcttccgcttgtacaagctgcgcagtctccgtcgaagcatccgcttctctctttcactgcaataccctttttacgttttgcttcacggaatgcattctggattgcgatcagcatagctaatacgaagaatgcaccaggagcaagcacgaaaattgtaagtggtgtataacctgcttttcctgcagctgcatcagctaacggaagaagctggaaaccaaaaatctgtccggatcccagaatctcacgaactgcaccgatacatgtcagaccaacagtaaatccaagtcccataccgataccatcaaagatagacggaagaaccggattctttgaagcatagctctcggcacggccaaggatgatacagtttactacgatcagagggatatagatacccagtgatgcatacagagatggtacataaccctgcagtaagaactgaacaatagttaccagagatgcaacgacaacgatgaatgccggtacacgtgcactgtccggaataatcttacgaagcagtgaaattaaaaggtttgaaaatacaagtacgagtgtcgtggaaagtcccatacctataccgttaatagctgatgttgtaacagccagggtcgggcacataccgatcaacataacgaaggtagggttctctttcacgataccgtttacaatacgttctatacacttattcatttaaaagttcccctcctgttattgtgcaagtgttctgtaataagccagtccagcatttacagcacttgtaacagcgcttgatgtgattgtagcaccactgattgcatcgatctggttatcagatgttgcacctgtctttgtaacttcaaatgattctacctgttttcctgcaaactgagaagagaaagaatcttcttttgctttcataccaagtccggcagtatcattgatagttgtgatggaatatccgtttaatgtaccatcatcggtaacaccgatagataaggtaacgtctccaccataactgttcggatctgttacagaaataacataaccaagttcagcaccgcttgcgtctacagcaacaacacagttttcaatcgtgtcatctgcgtatcctgctgcggcagctgcttctgttgcttttgcggaatcaaatccgtccatatcctcgaaagaagctgcatccgggaatacagtacgataagcattctgctgaatgttataatttgctttttcaatcgggacctttgtaatgccatatacagcacccagaccaagacctgcgataactgtgatcaggaaaaggatcagggcgtctttaatgatttttccgttcattatttttcccctcctttaccaaatggtttcgggattgtaaatctctcgatcagcggtaccagcatgtttgcaaagatgatggagtaagaacatccctcagctgatgcaccaaacatacggaagataccaaggagacatccgcagatgataccgtaaataatttttcccttcggagtgatcggagaagtaacataatctgttgccatgaagaatgcaccgaggatcagaccaccaccgcatacttcctgaacaacgaactgtccaagatcaccacttgtaaggtgtccgccgaacagtacgataaatactacaaatgttaaaatatatgtacccgggattctcagatcgataacacccatcaggatcaggaagattgcaccgatcagaagagcgatcacggaagtctcaccgattgtacctgcgatacgtccggtaaacatagccattgtatcactgtaaagctcgccacctttgatcactgccagcggagtagcgcttgacacaccgtcaaatgtgaagcttgtcatcgggcctgtaaatgcaagaagcaggaagcatcgtgcaccaagtgccgggttcataaagttctgtccaagtccgccaaaaaccatttttacaacaacgatcgcgaaagcgccaccgatgatcgggatgaaaaacggaacggtatgtgacaggttcagaccaagaagtaaaccggtaacaacacagcttaaatcacatacggtctgtttcttgtgtgcaattttgttatataagtattcggataccagacagcttgcgatagaaacaacaacaactgccagtgcacgcggtccgaaattgataataccaaatacagtagccggaagtaatgcaatgattacatacagcatgattctctgtgtactgtctttggctcttatatgtggtgatgatgtaacattgtataactcactcacaataatccacctctttctaacgttttttattttttccgtctgtttgcaagaattgtttttctcatggatttaatcgactgtgcaagatttctctttgcaggacatgtgaagctacagcttccacattctacacactccatgccgtgccactgttcaaatggctcttccagatgattttctgcaaaatcagcaagtctggaaggaacaattctggatggacatgcttctacacaacgaccacagttaatacatgctgttgcattctggcttgcatcctcaacggcatcctctgtcagacataacagagcagatgttgtcttggttgtcggaacgtcaagtccgaacattgcaaatcccatcataggaccaccggagatgatcttcttcggctgagtcttgaatccgcctgctgcttctactaactctgcatagtttgttccgatacagacatagaagtttctcggatcagcgattgcatcacctgtaatcgtaacgatacgatgcatcagcggtctgccaagttttactgcatgataaattgcaacgattgtatcaacgttatctacgatacagcctgcatctgcaggaagcatggtagagttgatagctctgcctgttgtcgcgaaaatcaactgacgctcagaaccctgcggatattttgtctttaatgctttgacttccattctcggctcattttttgtcagctctgtcagttttgcaatacaatccggtttgttatcctcgataccgaagataccttttgcattatcaaacagagaaagaatgattctcattccctcaattaatttctccggctcctcgatcattcttctgtaatcggaagtcagatacggctcacactctgcacagtttgcaataatgtagtcgattttttccggctccttcggtgagagttttacatgtgtcgggaatcccgcaccacccatacctacgataccggcattctggatctttttgatgatctcttctttgctcagagacgctacatcgtctaccggtgtaaactccagagatttaaactccccgtcattctcgaccacgatagagttcaccatgtctcctactgcaacacgacgtggctcaattgccttaaccgtgccggaaactgttgcataaatcggtgcagatacgaaaccgcctgcctcagcgatcatctgtcccttcaatacagcatcacctactgcaaccactggctttgccggtgcaccaatgtgctgtgataacggataaaccagatcacccttgggtaaatattcctgaatcggtttatctttcgacaagtcctttccatcgtatggatggacaccgcccttaaaagtacataagcccataacctgtgccccactttctctatatagtttcttacaggaaatcatataatatatcctgcaaaatatcttaaatattatagcacagaagattaaaaatgtattaatttcaccaaaaaaaaagttttgtattgaaaaaaataccacgtgaattataataaatacaagaatcgtcagtcaacaaaggattatttatgaaagatactttacatttcaaagcactaactcagaaaaactgttacgctgtttcttctctgaccgaagatacacttttcgtcgacatcgaaaccaccggtctctccgccgaaaaaaatcacatttattgcatcggttgttcctatctaaccggcgatcagatcgcggtaaggctccttttcgctgaaaataaagaggaagaaattctgatccttcagacatttgcagatttatgcagcggctttgacaaattgattacttttaacggcaccacctttgatgtcccatttctccggcatcggttcgaacacttccagattcccagtccgttggaggcactttcccacacagatctctatcaggagattcggcatttaaagaagctactgccgctgaccagttataagcaaaaatccatcgaactgtttcttggcatcaaccgggaagaccagtataccggaaaagaattaattaaactgtacaaatcttacgccaaagatcctgaggatgaagcattacaacttctgctattacataataaagaagatgtctttggcatgtatgaccttctggaaatattatcctatacatattttttacaggggcattttcaactttctgatatggaaatccaatctgtttccggcgatctgtttttcaatatcacattgatgccagatattttattgccgcagacagttcattgtatacaggaacatgccacccttgtcatgcatccgaacaaagtactgctgtcctttccggtctttcacggcgcactccggcattattttccggattataaaaactattattatctgccagaggaacatacgatcatccataaaagtcttggcacttatatcgatccagatcatcgccaaaaagccacgaaggaaaactgttatctggaaaagagctgttattatctaactttgccatatgcatcttctgatcattacttgaagcaggatctggcagacaaatcgacctatctggaactgccgggcacagatgatgcctttccgaaagggtaccgacttccgccagaacaattttcaactttagaagatttcgtacatctttattgtcaaactatactttccggtaaagatagtatttcaaaaagtaaataatgcttaagtcaaaaaatcccctgtccgatatttgtattgtctccaaaaattagttcaaaaaaatctaacaattggatgtcagtgcatggaccggggattttctttctattaaaagtttacaaaaaaggaaccgcgcactaatcacttagcgcaacggtccctttctgtttgttcaatctgttatttaatgttcaataagaagttcttactcctcttcagctgcctcagcctctgtgttctgagcgagtgctttcatgctcaggctgatctttctgtctgcctcatcgaaatcaacgatcttagcttcgatttcctgtccgatgcttaatacatcagctggtttctcaacgtgatctctggagatctgggaaacatgaagtaaagcgtcaacacccggtgcaagctctacgaatgcgccgaagtctgtcatacgtgcaactttacctgttacaacgtttccaactgcatatttctcagcagcattgttccaaggattctcctccgggaattttacgctgagtgcgatctttgtatctttgatatctttgataaatacttttacagtatcgccaactttgtagatttttttcgggttgtctacacgaccccaggacatctcagagatatgaagaagtccgtctgctccgccaaggtcgatgaatgcaccgaagtctgtgatgtttttaacagttccttcgataacatcgccaatgttgatcttctctaataactctttctgtttacgctctttctcagcaaccagaagctgttttctgtcaccgatgatacgtcttcttctcgggttgaactcagttaatacgaactgaatctcctgatctttgtatttgccaagatctctctcataagtatcagatacaaggcttgccggaatgaagattcttgtctcatccagaacaacacttaaaccaccgtctaatacctggcttactgtacctgttaatacttcgccgttctcgaaagcctctttcagacgctcgctgcctttctcagctgcaagacgtttgtatgtaaggagaacctgtccctcaccgtcgtttactttcagaacttttgcttccatggtatcgccaacggaaacaacagtagtaaggtctacattattgtcgtttgtgtattcgtttctggtaataattccgtctgatttatagccaatattcaggataatttcatccggtttcacatctataacagtgccttcgactacctctccatttctgattgtttttaaagattcttccaacatttgttcaaaactcatttctgacatatttttgaacctcctcaataatattatttggggttgaagcccctgctgtaatacctacgtagtcgaaacgcgaaaagtcagaattctctagatcttctttcgtttgtataaagtaagtatttctacatttttcagagcagatttcatacaactttcttgtattggagctgcttgtccctccgattactaacattgcatccactctgccagaaagctctcttgccgcttcctgacgttccttggtggcattgcatatcgtattgtgaacaacaaattttttatccttgtccaccgtactctcactatcatacccttttttttgaataatttcaataagttcttgaaatttattgtaattaaatgttgtttgtgcgacaatacagacctttttccacggtttcagatccagattctgtgcttcatcgaccgtagagatcaccgaagtacgtgtttcatccgaccatccgacgattccctgcacctccggatgatccccgcttccgatgatcaccacataatatcctttttccgaatactcctgtaccagcttatgaatcttttttacaaacggacaggtggcatccaccacgcgcagtccatccgcggtcagttcttcctgttcccggcgggtgacaccatgggaacggatcacgatcgtaccctcggtaagttctttggcttcctccagggaatgaatgacctgcacaccttttttctccagatcatcgatcaccgtctcattgtgaatgattggtccatacgtataaaccggcgaaaactgtttggcttcctcatacacggtatccactgcccggtttacgccaaaacaaaatcctgccatctttgcaagttctactttcatgcgtccagtcctgccttttttgcctgttcataaatcgcttccacaacttcatcaatattgagatcagaagaatccagcattaccgcatcttctgctgcttttaatggtgcgatctcacggtgcatgtcacggtaatcacgctcgctgatatctttttcaatctctgccagatcacactgttctccttttgccaccagctcatcataccggcgttttgcacgtacctctacgcttgctgtcaggaaaatttttaactgagcattcggaaggacacaggttccgatatctctaccatccataatgacattgtgctgtgctgccatatcctgctgcagactcagcagttttgcacggacaaaaccgtaaccgctggtagcggatgccatattgccgacttcctcctgacggattttatcggaaatatcttcgccgtttaacaacactttctgcacaccattttcataggcaagtgcaacagaaatatcgtcacagacttcctttattttttcttcttcctctgccttgatgccatgctgtaaaaaataatatcccatggcacggtacatggcaccggtatctacataaataaaggatattttttttgccagttttttcgcaatggtactttttccggcgcctgccggtccatcgatcgcaatgttaaaactcatatgttccaaacctctcttgtttctatttatctttcttttattcacaaatctttgtaaattgtataggattctttaaactacttttccttatcccttaactcattttagaaatatcatgatcaagcgtattctttcaaaatgctactcaatgctgatacctgccagatagcctgtagaccacgcgatctgcaggttaaacccgccggtcaccgcatccacatccagcatctcgccgcacaggtacaatccctgtaccagctttgactccatcgtggacggatttacttccttgactttaatgccgcctcttgtaacaatcgcctcttccatttttccaagacctgtgatagtgcccggaaaatgcttcagcagcgtcaggaggtgatgccgttcttctctggtgacagaatgcacttttttctccggatcaatgccggacagtccgatcaacaccggcatcagttttgcaggaaccagtccatgcagggcattcttaaactgccgattcacattttctgcgaaatcacgctgtaagcgtttgtctaacggttcttcctccagcgccggtttcagatcaatctcaaatgccagctcctgcttcatatatttgtcagggatgcagctgcttgctgtcaggactaacggtccgctgatgccctgatgggtaaaaagcatttctccgaattcagaatataacgtctttttcccggattttaccgtgagtgtcacatttttcaaggacaatccctgcaactgcgggatatactcttctgcagttgtcattccgatcagggaaggacgtaattccgtaacagtatgtcccagtttttgacacagggtaaaaccacttccatccgaacctgtcgtcggataagacatgccgccacaggcaaccaccacagcatcgtactctgatacctgatttttctgatgggtatcatgacaatcccatcgaagtcccgtcacctttgtgccatcacttaaaatctcctgcacctttgtattcaggcagacgcgcactttttttctgcgcaattcctctgtcagcacacggatcacatcagacgcatgatccgactgcggaaatacacggtttccgcgctcagtcttcattttcagtcccagacgttcaaaataatccattgtcgcatgattatcaaaggtatagattgcactgtataaaaatttttcatttttcctgatcgctgcaaacagatcttccgtatcacaggcattggtcagattacaccgtccctttcctgtaatataaatctttttgccaagtttttcattctgttcatacagcgttacctgatgcccgtttccggctgcggtacacgctgccatcattccggctgcaccgccgccgattactgccacattactcattcaatttctccgattttcactcatttttcttattttgcagaatgtctgaatctgaaatcctgcaaagcagttattcttttttgtcgggatcctcccggtctacgtgatccactttgccgtatcgcatcttcatatggtcatcaatataattgatctcatcactttcatagacctgatattcgtcccagatgtcctccagtgtttccaatgtctctgccacttcattctgctttctcatgcacagagccacgaccagtgcattgatcacactcaacggagccaccagggaatccacgatggatgccatatcactctttgcgatcagattgcaggaggaatacagattcatcggggaatgtacgctgtctgtcagggtgatcacttttgcattccggttgttggcaaattccatcgcctttaacgtacgcatggaataccgcgggaaactgataccgatgatcacatcctcctcactgatgcgcaccatctgctcaaaaagctcactggagctgctggtatgaagcagatgcacattgtcaaacatcagattgaaataaaatgccataaaacttgccagagatgcacagcttcggattccgacaatataaatatgttttgcattcaaaatgatatccagagccgcttcaaaagcattctgatcgatctgatctaacgtacttttaattttctctgcatctgattgtaatacagtctcaagaatttttgactggctgattcttccgtatgtgacttccatacgctgaatggaatttaatttgttccgcaccagttcctccagtgctttctgaaattccggatacccgcgatatcccagatgtgttgcaaaccgcaccacggtagactcactgacaccgacaactttccccagtttttccgctgtcagaaatacagctttgtcatagttatcggtaatgtatgtggacagtaacttctgtcccttactcatactgctgtacttttcattgatcctgttaatcaattcatttgaattattcatttctcttctccatttttcaagaatacaacatgtattctttataatgcgtgtcaaacgttctgccgcatcacgcttagttactagtatacctcaattcttcgccggaaacaattagaacttccactttagcaaaatctcccacaggcaccagggataatctgatgcaaaaagcgtttcatccgcaagaatcctgcgggtctgcaccggcaatccattccacaaaatttcttctgttgcgaccacatccccttctgtgaccggaaatgaaagttccttttgtccctggggattcatcgtaatttcatcattttctgagacaagtatttgaaacgcacaggcttcttttgtcacagacagcgtatttgtaaaataataatggttttttccgaatgtctttaccatagtccggttcaggtctatggtctgatgttcttcctcttttaaaatcgtccggttttcataatggtcatttccgtatgaaatcagtgctttcgaatcttcccatttgtaattcttgtgatttggccacccacatgccaacagagcaaaggtgtaagtacggtcattttgacgatatgcccccacataacaataaccggcttttgccgtaaaaccggttttgccagagatcactccatccagcatagaaagtaacgcattatgattgtttaatgctgcctgaaatgttccatcgatactgctgattgtttttgaagcagtttccgtaatttccagaaatttatcattttggatacaggttgccatgatcagactgagatcatatgccgtcgtctgatgttcaccttttttatcggaacggtccagtccgttcggggttacaaaatgcgtgttctggcatccaaattctgctgcccgttcgttcatcaaatctgcaaaagcttccacacttcctgccacatgttctgcaatggcagctgccgtgtcattgtgggattccagcatcagggaatacaataaatcttccagtacaaactgtgtccccgttggacaaccaagccgcacttttggcatgctgcaggcgtgtttcgaaaatgtcaccgtatcctgtattttcccactctcgatcgccagcagacaggtcatgatcttcgttgtactggcatttgccatcggcgtgccggcatcttttccgtacaagatccgcccggtatccgcatcggtcaatactgcacttttggcatacagattcagatcctccctgtgaaaatctgcaaaattctgactgatctcctctgttggaaatctggtcgctgcatagccgttttctgtgaaaatagcacatataaaaattgcagtcaaaaatatacgcaaaaatattcgtccatgaaatttacattcaaagttctgatacatatacttttgcttttcctgtttttcactattttacgtatttccacattgattcagaacgtaaaacaagtttacatatttctgcattaattcagaacataaaacacaaaagtactccctgcctgcataacctgacttttctttcccataacattgtgttttccctgtacaacaaaacaggagccagctaaaaagctaactcctgctatcagtgattccacaacctattgattatctctgattcggcattttccatgcttcatgatccgtatgtaacagttcatgagatttatgagataacggtttctcaaagaaatcttcatacgctttgatcacagacggattctcatgagagaaacgaagcggattcttcttatccagatgatacagatttcttctacgtacatctgcaagctccacgccatcggtgattggctgaccaccgccgccaacgcaaccgcccggacaagccatcacttccacgaaatggtattccgcttcaccggaacggattttctccatcagttttctagtattgccaagtccgttgacaatggctgctttgatcttgatgcctgcgatctcaagctctgcttcacggataccgtccataccacgtaccattttgaacatctcaggatccggatttttgccatttaatacatagtatgcggttcttaaagctgcctccataacaccgccggttgcgccaaagatgacacctgcaccggagccaatgcctaacggctggtcaaattcttcctcctctaagaatgccggagaaacaagttctgccttcaatacacggtctaactctctggttgtcagagacagatctacatccggacctgctcccgcatcatccattcccggaatttcacactcatgtttttttgccacacaaggcataatggaaacactgaaaattctggacggatctacatccaggatctgtgcataataagattttgccacagcgccaaacatctgctgcggagattttgcggtagacagattttttgtcatgtcaggatactgagattttacaaagcggacccaacccggacagcaggacgtaaacattggccatgaatactgatctgcatgtgtcatacgctccaaaaactcatttccttcttccataatggtcagatcggcagaaaagttggtatcaaatacatagtcaacaccaagggctcgcaccgctgctgccagtctcttctctgttgccatctcccgtggaagatctaagccctcaccccatgctgcacggacagcaggtgcgatctgaacaaccacgattttctccggatcatgaactgcattcatgaacggatcaatatcatcacgctcatacagcgcaccaaccggacagtgggtgatacactgtccacagactgcacagtcggattctgtaatcttctttctgccggatacgccaacgctggtacgttttccggtattgatcatatcccagattccaagtccctgtactttctcacaaatctgaacacaacgcatacatttgatacacttgcttgcattacggatcagtgggaaatcctgcggccattcatttacttcataatgttcttcaaacggaacttccccgatattcagttcatttgccaccgtctgcagactgcaatttccacttttcacacaggaagtacaatgtgcatcatgctcagacagaataaactgaacgttcatacggcgggcatgctgcgctttataactgtttgtatagacaaccattccttcttctactacggtattacaggaagctaccaatgtctctttgccctctatttctaccacacagatacggcaggatgcgatctcatttatctcttttaagtaacacaatgtcggaatcttgatgcccacctgagcagcagctgccagaattgtcgtaccctccggcacctgaacttttttattgttaattgttaaatttaccattcgaactctctgcctcctctcagtgtggcgcaaccataatgatcgcatcgtaagcaacggcttgcttcctgctctgcttcttcgcagctcattggaagttcaattgcttcaaagtttgttcttcttgcccatgcctctacttcctgaaggttgacacgtccacaaggaactttgtcattcagcatcggctcaggaattgtaacatcacaactgatcggatgatgacagccaagatattcgtcaatatttgctgcagcggctttacctgctgcgattgctttgattactgtggatggaccggatacacagtcaccgcctgcatatacgccaaccatgttggcagcaccaccttcattggcaacgatgcgtccccagttggtagcaagaccgaaatcagcaaacggctgagatacgatatcctgtccgatggcaaccagaacgatatcacattccatacgttcttccggtttgtttgccttacgcggggaaggtctgcctcctcttaccggtccgatgatctgcggctgtacccagagtgcacatgcgtttccttctgcatcggcttctacacgaagcggtgcttttaaggtaacaagctcgattccctctgccacagcaccttctacctctgccggaagtgcagtcatatcttcctggcgtctgcggtatacgatacttacagtctctgcattggcacgaattgcagttctcgcacagtccattgccacgtttccgccaccgacaacaacgacacgtttgccggtgtaatccggatattttccatcgccgatctcacgcagcatatcaaccgcagagattacatttttgctgtcctcgccttccagaccaagttttttatcggtatgtgcaccaattgccacataagttgcatcgtaaaatttatgaatctccttcatttcttctgtaccgatattttgattcatttttacttctacaccggtagcaagaattgcatcaatatcctcctgcagacgttcacgtgggaaacggtagtttggaataccgtaacgaagcataccgccaaggtgctgcttctcctcaaatacagtacaatgatgtcccattaactgcaagaaataagcagctgtcagaccactcggaccaccgccgataatggcaatatttttgcctgttgacggtgcacattccggaaccggtacctgatcggacggtgcattgtccacgatatatcgtttgataccacggatattgatggaatcatcaatgatatttctgcggcatcttgcctcacacggatgctcacagatcagggcacatgcagtcgggaacgggttgtccttacggatcagacgaaccgcatcctcacaacgtccctctcctgccagtgcgatatatcccgggatgtctacatgtgccggacagagtgttacgcaaggaatcggttgctcgaatgatcccagacatctgtgttctgtaatatgggaaatataatcttctttgaaaccttccagacctgccagcaccatacgcgcggattcaaaaccaatggcacaatcagcagagtttttaatattttctgctgtctgctcaatcaatttcaaggtgtccatggtcgcttcattattcagaaccttctccagaagatcttctaactgtcccagaccgatgcgacatggaacacattttccacatgtctgtgcatgacatacttttaagaatgccagctgcatatctaccggacagactcccggtggatttgccacaattcgctgtgtaaattctttcataagctgttccgtcgtagaatttactttgtcagctgatactactgataatctgctcatatcctatcctcctaaacctttaccactgtaaagtcggttgcatcacgatgattttatgtaaattccagaactgctttttgtatattttttacatattttcatccgtttcgcaacgcccatgtgtcgtatattaatataagattgtatttatttcaatactgataaatgggttatcaggtttccggttagtcactttaacctatttttgcaacctatttttgtgcattttgcacaaatcatcacaaaggatattagcacttgtttataatagtcaattaattaacaatatttttaatcgaattcgtataattttgacacttaattttgtgaacttttttattctgttttattttgtttcgttctgttaattacactttcaactgaagctgcacttcttcctcagcttcctgcttcaattcctcgatcttatccggattcatgtccggtaattcttccacagactgcacatcaaaacagcgtaaaaactcttccgtggttccaaacaagatcggtcgtcccggtgcatccagacgtcctgcctcctgaatgagtccataatccagaagtttattaatggcatgttcacaggataccccgcggattttctcaatctctacttttgttaccggctgcttatacgcaacaatcgataacgtttccaataatacatccgtcagcacctgtttgcgtggctgctttgcgatccggatcagatattcatactgggacggttttgtacagatctgatacgcgccatccagttccaggatctgcagtccacagttggatgcctgatagcggtctgccagattccgcacgatcagttctgcctcccgctctccgacctgcagcgcaaacgccagttttttcagttctaccgaatctcccattgcaaacagaatcgcttctgccgctgcttcgtattcttcaattttcatgtttctttactcctgtatctccaattccgttttcgggcatacggtaatatagatttcgtcaaataaatgttcctgttcgatctgtatccgcccggttttcatcagttccagaataccaaggaaggttacaatgatctccaccttacttccctgccgctccagcagatcccggaaagaaaaacgttcatgttccatgcagtaagtttccagatagatcattttctcatccagtgacacttcctcccgttcgatttttccaaatctggaacggatcggatccattttatcagtctgttttttcatgactgattcaaaaatcgcatgcagcttcttcagatcgtaccctttcgtcaattcatccagatccagcggttcttcataagagcgcacttcctccggaattgatggatttttgaacagacggcgtcccgcatcaatctgccggtcttttaattcctgtgacatatatttaaacagcttgtactgcagcagctgctccatcagttccgcacggggatcgatttcttcttcctcctcagactcttccttgggcagaagccatttggacttgatctccagaagcgttgccgccataaccagaaattcactcataatgttcagatcctgacgctgcatctcccgaatataatccagatattggttcgtaatctccacgatcggaatatcataaatactcaccttgtttttatccagtaaatgaagcaacagatccaacggtccctcaaatacttccagttttacctttaattccataagacacattttctccaatcttacactattgtactgaatccccgcaaaaattcaaggtctttctctggtttttccctttcttctcccactttctccctgtcaaacgcatagtttttcccaccggcacataaaaatatagaaaaacattccgggattctatatgaaaataagattgaaacgccacttttctgtttttctcgcgctcctgctgctgttgtgcacccttcctgtcaccacttatgccacagaaatctctgcatctgatacagaaactgctggctctgccccttccgttaccgcgccatgcgccctcttaatggatgctgccaccggtacgatcctgtatgaaaaaaattccaccgaagaacgcccgctggcaagcgtcaccaaaatcatgacactgcttttgatttttcaggcactggaagccggacagattcatctggaagacacggtaacgatttcagaacatgctgccggcatgggcggttctcaggtgtacttagagccaaacgaaacccagacggtggaaactctaatcaaatgtatcaccgttgccagtgccaatgatgcctgtgttgccatggcagaactgatcagcggaagtgaaaatgcctttgttcagaaaatgaatgaaactgctgcctcccttggcatgacacatacaaattttgtaaactgctgcggactcgatgcagacaatcattattcctgcgccaatgacatcgccctgatgtcacgggaacttacggtaaatcatccggcaatttttgattataccaaaatctggcaggaagatatcattcaccatactgcccggggcgattctgcctttaccctcagcaatacgaaccatctgatcaagcagtatccttatgccaccggactgaaaaccggttttacctccaaagccggtttctgtctctccgcaaccgcaacgaaagattcgctcagtctgattgcagtcgttatgggcgccacaagcagcaaagaacgcattgcagatgtgaaatccatgttcgactggggatttgccaactgccgcgtgtatacagatgaaaatcaggatgtcttaccggacattttggtttccagaggcagtcagtcacagctttcactgcaatatgaatccgctttccattatcttgacacccaaaataccagtggagaattggagaaaaaattagagctcccggatcatgtggaagctccaattcaaaagggtgacgtgatcggcaaagctgtgtatacactaaacagcgaaaatgtgggatctgttaacattcttgctgccgatagtattccgttacttactttgaaagacgcatgggtacagattgtatcccggttcttcctgaacaatagtaaccacagctcaaatggagaaccttccgttgctaagaattactgctctcatcaatatttctagcgcacaaaacgaacattcaccatccgcctttaccacttactcatgcccccagttcctttgcgatctatatttaatatacagatagtaattttcgaagatcaatagttccccagcattttatccggcgatccatcccgatacggtccgcgctgcgatacaactgtaattttacctcatttggtgtcagagaaggatctttgctcaaaagtaacgcaatgataccagatacaattggcaccgccatggaagttccactctttttcacataacttccctgacgcgtgccacaactgataatatccgttcccggcatcacgatctccggttttaccacacaggacgctgtcggcccccgcccggaatacaggctcagttcccgtctggtttcactgcagctatccaagcttcccaccgtaataattttctttgagatcccgggactggtcaccgtatgttctcccggcccattgttgcctgcggctgccagtaccacaatcccctgatcccaggcacgttctacactttgcaacagacgcttctgcaattccggctgtacccgttccaacataccaacagagatattcataatccgtattttctgcgtatgtctctgattgtatgcaacaatatcctctactgcctgacaggtatcctgaatttttccgtttccgtttttatccaaaaccttacagctccacaaatagcaccccggtgcaactccatgaatggctcctttcccaccggctcctatgattccgctgatatgcgttccatgtccgttatcatcataaggctgcggacgctgtctgatataatcccgaaatccggcaattctcccctgcagatcagtatggggagaaattcccgtatccagcaccgccacaagaataccctgtccgaaaatcccctgtctgtatgcagcagacgcatgaatatattttaaaattctttccatatagtaatatattctgcctggcagaaagtgcttttgtccgggaaaattttaacgaaagttccaattttagccaaaacaaaaccggcaggcatctgcccaccggtttttatttcatcatttattattttacatctttcatgctgaagctgattcttcccatcttgtcttttccaaggcaaacaacggtaaccttgtcgccaagtgtcagaacgtcttctacacggttgatacgctctttggaaatcttggaaatatgaaccattccctctttgcccggagcgaactcgatgaatgcaccaaactctttaatgcttacgactttacctgtaagaacctgacctgcctcgaaatctgttacgatgatgcggatcagctctgctgcacggttcatcatgtctgcgtctgtaccacagatagatacggaaccgtcatctgtaatgtcgatcttaacaccagtctgctcgatgatggcattgatggtctttcctctctgaccaacaacatcaccgatcttctgcggatcgatctgcatggagatgatcttcggtgcatattttccaacctgtgctctcggctcagcgatcgccggtttcataacttcatccagaatgtaaagtcttgcttcacgtgttcttgcaatagcttcctctacgatcggtcttgtcagtccgtggatcttgatatccatctggattgctgtgataccgtcatgtgttccggctactttaaagtccatatcgccaaagaaatcttccagaccctggatatctgtcagaacgatgtaatcatcatctgtctcgcctgttaccagaccacaggaaatacctgcaaccggtttcttgatcggtacacctgctgccatcagagacatggtagatgcacagatacttgcctgagaagtagatccattggactcaaatgtctcagatacagtacggattgcatacgggaattcttcctcgctcggaagtaccggtactaatgctttctcagctaatgctccatgtccgatctcacgacgtcccggtcctctggacggttttgtctcacctacagagtaggacgggaagttgtagtgatgcatgtaacgtttgcttgtaatattctcatccaatccgtctactttctgaacttcagataacggagccagagttgtgatcgtacagatctgtgtctgtccacgggtaaacattgcagaaccatgaactcgcggaatcaggtcaacttctgctgccagcggacgaatctgtgtgatagcacgaccatccggacgtttgtgatcttttaagatcatcttacgaacagtctttttctgatactgatatactgcctcgccaagaactgcaagccactcttcgttctctgcaaatgcctcttccagtttctctgtgatgacacggatattctcctcacgaacctgttttacatccgtaaatacagcttcttccatctcttccggtgttacgatctcgcgcattgctgcgaacatttcttccggaactgcacagcttgtatactcatgttttggtttgccgatctcagcaaccattttgttgataaattcgataattgtctggttgatctcatgagccatatagatagcttcgatcattttctcttctttgatctcgtttgcgcctgcctcgatcatgataactttctcggaagtagatgcaacagtcaactgaagatctccgttatcccagtcagcctgagacggatttacaacgaattcgccgtttaccataccgatctgtgtagttgcacacggtccgcagaacggaatatcggaaatacttgttgcgatagcagaaccaagcattgcaagaagctccggacggcactccggatcaacgctcattaccatgttatttaaagtaacgtcatttctgtaatccttcgggaataacggacgcatcggacggtcgataacacgtgctgttaaaacagcgttctcagatgcttttccctcacgtttgttaaatccacccgggatttttcctacagaatacattttctcttcgaactctacgcttaacgggaagaaatcgattccctcacgcggtttttcggatgcagttgctgtagataatacaactgtatctccataatgcataagagctgcgccatttgcctgtgcagctacacgaccgatatcaacgcttaatgttcttccggccagttccattgaataggttttcttcattattttctctccttctttactgtggcaggagacccgaaactactgatctgtacaaaactttcccacatcacacttgcatctatcctttgtacaagtgatccatggttttgcacacatcagcggtctcggataaaccctcccgccaatccaaaatagagcggaaattccgctctattctgacagctatcctgttattattttctgatgcctaattttgcgatcagtgcacgataaccttccagatcttttttctgaaggtaagcaagcataccacgtctctgaccaaccattttcagaagacctcttctggaatgatgatccttcgggttctctttcagatgctctgtgagctcctggattcttgctgttaagattgcgatctgtacttccggtgatcctgtatcgtttggtgttctaccatactctgccataatcgctgcttttttttcttttgaaatcatcttgatttcctcctttattttttataatcgcccaatcacgcgtgtttactaagtaccggtcggagtgtccgggtactgagtatgggctttttactcacgcctaatcaatatatcatattcaatctgacttgtaaaccattttctgcaaaatcatccaccgtcggacttaccaaaaatcatctgctatctctttttatgcttcatgcacatttttcagatattccttacaaaccaaaatatcccggtccatctgtgcctttaattctgccagagaaccaaatttccgctccgggcggataaacttcaggaaagacactttgatgtcctttccgtacagattgcctgagtagtcaaacaaaaatgtctctacgcccataggattgaccccttcaatggtcggcttgcatcccacgttgctgataccgtcatactgttttccttctgccagaatctccactgcatacacaccctttggtggaagcagtttaaattcttccgggcgctgatttgctgtcgggattccgatggtccgtccgatctcgttgccgtgaagcaccgggccggtgagaaaataagaatagcccagcagataattggcttcttccatatttccttctgcaatctccttacggattctcgtactgctgatatcctcgcctttgtactgttttttcttaacgatcactgcctcatagcccagatcatccgcatactgctgtaattcccgaaaggaaccggcacgctgatatccaaaatgaaaatccgtgcctgccacaatcatttttacattgatcttctctttcagcatctgcaaaaatgcatagggagaaagctgacggaagtcatcggtaaacgggcattcgatcagataatccactcccgcttctgcgaaaatatgtgctttttcttcattcgtagataacacattgtacgtatccttgtgaatcgctttcggtggaatatcaaaggtaaagatcacacatttgagcccctgctccttgcctttctgcatagcctccatcagataacggtgtccgctgtgcagaccgtcaaacttgcccagagtgataaccgaaggttcttcaattttaaaatccaatgtatcttttatatatttcatccttactcgttaatcctccaaaaacatttttgacggacggaacagtccaagatcttcccgatattcataaacggctgcaaaacgtccatccgacatccggacacgcactttcatttccggttccggttttatcgtttcctgaaactgctgcagcgccatcttattgccattttttaacataatgtcaaattccggctttgctgtcagcaccggatacacttcaaatacatgttcgatcggggtcaccacatcttttaatgtgccagcttctttatattcctgtaaggtgtccagcttatatgcatcttccatgcgatatcctgctgcctgaagacggacaaggcttttcatagccgcaccgcagccaagtttctgtccaatgtcatgacacaacgtacgaatgtaagtacccttggaacaggaaaccgtcattgttacgtacggaagtgctatgttttccacctgaatcttataaatcgtcaccggacgggctttccgctccacagtgacaccggctctggccagatcacacagtttctttccatttactttcaatgcggaatacattggcggaacctgatggatctcgccttcaaactgcatcaccgcatccataaccttctgttccataagaccggaagtatccactttttttaaaatggttcccgtcagatcctgtgtatccgtttccacgccaagctgcatgaccgcacgatataccttatccgaatcggtcagcatatcacagactttcgttgcttttccaaggcagactggcagcacgccttccgcatccggatctaacgtcccggtatgaccgattttcttctgtccacagatcccgcgcatccgcgccactacatcaaaagaagtatatcctttttccttgtatacatttatgattccgttgtacatccatcttcctcttttgtctttaactgctttctgacttttgcaagtacttttttgaggatgtcatccggttttccctcgatggacgcaccggctgcccggcaatgtccgccgccgccaaattctacggcgatcgctgccacatccacataagaagcggaacgaagactgactttataagtatcattttcattcggatatacaaacacagcagcctctacgcccgtggtagaacgcagggtacttacaattccatccagatcttttggttccacatgaaatttttccagctgtttgcgcttgatcacactggaaatacacattccgtcaaaatgcagctccgcatccatcagtgcctttccaagaatctgctgctgcgcaaaagtacggatatagaatgtctcgtctacgatccgggaataatcaatgcccttatccatcagttttcccgcaatctccatcgtcttcgatgaggtgcaggaatattgaaacacacctgtatcatgcacgattccaagataaatacactcggcaatctcttttgtgatcttgctgctatctaaaagctgataaaccagttcacaggtagagcttgcatttgggaaaatatagttaaaatcagcaaaagactggttactgatatgatgatctacacaaaatgtgctttttgccacctcaaaatactgtcctgccaatcccagacgacctgcatccccgcaatccagggcaataaacagatcgtattcttttttaccgtctgtctcacgaatatggcgaatcttgttcgcatttttcaaaaacagaaatttgtccggtattgtctccagatacacatccgccataatgtccggataattgtcacaaatataattatatactgccaggcaggagcccacacagtcgccatccggccggatatgaccggaaatagctactgtatggattccttccaaatatgaatctaatgaaatcatgtccatcctcttactcttcctctttgctgccacctgttaatgcatcaatcttctttgacatctcaatgccatattcaatggactcatccagaataaaccgaagttccggtgtatttctgagattcagggactgtgcaagacaacgtctcgcatagcctgctgcatttttcaatccctgaatggtatcctctttttcttttttgtcacccagtacactgatataaaccttgcaggttttcagatccggagcaacctgtaccgctgacacggtggtcagcggatgaatacgcgggtccttgatctcattgcggatgatcgtagataactcacgcattacttcttcatttaaacgggtatttttaatactgttttttctcatattctgtcatctccagactatcttggtacttctaccatcttatatgcttctacgacatcaaactctgcaatgtcgttaaatccttcaaatacaagaccacattcatatccggcttttacttctttgacatcgtctttgaaacgtttcagggaagctaaatcaccctcgaagatctgttttccttctcttgtgatacgaactttgcagttacgctcaaatacaccatccagaatgtaagaaccggcaatgttgccgacaccggaagctttgaagatctggcgaacttctgcatgaccgatgactttctcctcaaagatcggatccagcatacctttcattgctgcctcgatatcctcaattgctttgtaaataacggagtacagacgaatgtctacatgctcctgctctgcagttgcttttgcagttgcatccggttttacgttaaatccaatgatgatcgcattggatgcggaagccagagaaacatcggactcgttgatggcaccaacaccgccatggattacttttacgactacttcctcgttggaaagtttggtcaaactctgttttactgcctctacagaaccctgaacgtctgcttttacgatcagttccagctcttttaagttgccagtctgaatctgtgagaacagatcatccagagacattctggatctggtctcctcaagcattttctctctgttctgggatacaaaagtatctgcaaagcttcttgcgtccttatcagaatcacatgcaacgaatacttcacctgcattcggaacactgttcagaccaaggatctcaaccggtgtagaaggacctgcctctttgacacgtcttcccttatcatcgatcatggcacgtactttaccatagctgcttcctgctgcgatcggctctccgacttttaaggtacctttctgaaccagaacggttgcaactgcaccacgtcctttatccagctgtgcttcgataacaagaccacgggcttttctcttcggatttgctttcagctcaagaatatctgctgtcagcagtaccatctcaagaagttctgtgatgccttctccggtacgtgcagataccggtacacagatggtgcttccgccccagtcttccgggatcagtccctgctctgcaagaccctgttttacataatcgatatttgcgctctctttatcaatcttgttgatggctacaatgatctcaatgcctgctgcttttgcatggctgatcgcctcaatagtctgcggcatgattccgtcatcagcagcaactaccaggattgcgatatccgtagaatttgctccacgcatacgcatagctgtaaatgcctcatgacccggtgtatcaaggaatgtgatcttctgtccgttgatctgtacgacagatgcaccgatatgctgtgtgataccacctgcctcgcgatcagttacatgagtctcacgaatggcatccagcagagaagttttaccatggtcaacgtgtcccataacacatacaaccggcggtctggaaaccagtgtgttttcatcctcttcttcctctttcagaagttcagcgataacatctactttctcttccggctcagcgatgcagttgaactccagtgcgatctcttctgctttctcgtaatcaacttcctggtttacagttgcaagaataccctgcatgaataatttttctacgactttggaagccggtacatcgatacgctctgccagctcacgaacggtcataacttccggcagggaaatgctgcgaacttcatctgtcttcttttctgcctgcggctgtggctgtgcattccgttttttgtgtcccgtcttcttctccaggtttacgtactgctcctgtttacggttctttctttcgtaatcctgtttgtttttctttttatttacgtgtgtattctcttttccgcgcaattcctcgatggacgccttgttgtcacggttcatacgtgaaatatcgtggtctaagcgtcctctcgattctctcgaacggcctgaattgtcctgtcgattgtttcgattacctccaaaattattaccaccgccgcgattaccctggaagcctttctgattattgttgtcttttctttcataacggccatttctatcaccattttcctgtcttgccggtctgtcaccatatcttctctgtggacgatcaccgtttcttgccggacggtcaccatttgggcgctgggaacggtcgccgtcgtaacgtggacgatctccattctgacgctgtggtctgtcaccgttctgacgctgacgattgtcgtaacgtggacggtcaccatcctggcgctgacggttctctccgtttgcacgctgtggacgatctccattctggcgctgcggacgatccccgtttctatttccgttattggaacgacgattgctcatcttgctgttctgcggattgtatacagcagaaatgcttgattttttcttcggacgctcttttttatctgcgtctgcctcgccactctttccatattttcctctgactaatgcaaccgcattgtcttccagtgtactcatatggctgcttacttctatattatgtccttccaggaaagtcattacatcctttgccggtacattatattcttttgcaatttcatgaactctgatttttgccattctagttcctccctattcagttgttggtctgttatctaactgcttcatgacagatttggcaaagcccggctgcaggatcgctaccatagagcggtactccttgccgatgcaatgaccaagatcatctttacttccatagatatacagaggggtttcataaaaatctgtcatatttttcattttcttctttgtattatcggaagcatcttctgccacgatcacaacacacgccataccgcctttgacggctttctccaccgcaaattctccactggcaatgcatccggctttctgtgcaagccccagacctgataaaatcctgttattctgcaatcgttttcatctcctctgtcaattccgcaataatttcttttggtatactcattttgaacgaacgttccaatccgtgattctggactgcctgatccagacactccatctttttgcacaaatatgctccgcggccgtttttgcgacctgccgcgtcaatacaaaaggtattgtcctgcattttcaaaacacggatcatttctcttttttcccgcatttcgtgacatcccacacacatgcgcatcggacttttcttattcattctctccatcctcatcttcgatttccggaatattaataaatccatcgtcatcggaagcatctgtcggatgatactcctcattcatatcttccagatcgatgtcgtttaattcttcatcctcgtaatcttcttcataatccatgaagtcaccggcttctcttgcctgtgtctcactcttgatgtcgatcttgaatccggtcaggcgggctgccagacgtgcattctgaccttcttttccgattgccagggaaagctgataatccggaacaacaacttttgccttgttctcctctgcatctgcaataacggagataacttttgccgggcttaatgcattctcaatgagcatagccgggttctcattccagttgatgatatcgatcttctcaccgtttaactcttctacaatggcattgacacgggcaccgttcataccaacgcatgcgcctaccggatcaacgtccggatcattggaccatactgccatctttgtacggcttcctgcctcacgggcaatgctcttgatctcaacgataccgtcacgaacctctgcaacctctgactcaaacagacgttttaccagttccggatgtgttctggatacaagtactttcggtcctttggaagtagattttacatcgattacatatactttgatacgctcggtcggctcaaatgtctcgcccgggatcatctcgttttcactgaggacagcgtccactttaccaaggtcaatacttacattgtttccaatataacgctgaacgataccggttacaatatctttggacattccataatactgatcaaagatcactttgcgctcttcctcacggattttctgtaaaataacattctttgcattctgtgttgcgatacgtccgaaatctttggactggatctcctcatggatcacatcgccaagtccatgaccaccgccgatcatcattgcctctgcaaagctgatctctgtcagcggatctgtcacttcctgtacgacggttttctcagcgtaaacatgaaactcacaagtctccggatcgatggtaactttgatattgtcagcttttccaaaatggtttttacatgctgtcagcagtgagttctcaattgcttccagtaatgtatccttgctgatatttttttctttttctaaaattgtcaatgcttccagtaactctctgctctcagcattttttttgctcttgctgctttttgccattttttcctttttcctcctgttctaaaaatcaaatgccagtctgatcagtgcgatctcgtttttctggaaagtaagtgcttcaccttcctccggctgaatcgttacggtatcttctgtatatccggtcagaattccataaaattctttctgacggttgattgcacgataagtacggatctctaattcttttcccatacttctcacataatctttttcttttttcagcggtctgccaagtcccggggaacttacctcgaatacataagaatcggcaataaaatccttctcatccagcagatcgttcattctgcgggcaactgcctcacaatcattgacggtaatgccgccctctttatcgatgtaggcgcgtaaataccaggtgcttccctcttttacatattccacatctaccagttcaaaattcatttcttccatgatcggaagtaataaggcttctgtacgtgcttcataatcttcgcgttttgacatctttgtcaccttctttctcagatttcactatacaacaactaagagtggactcgcgcccactcttacaacatactacatattcttaattaataatttatcacactatttacaaagatgcaagttttttttataccatgcctgcttttactgtccgcacattctgtcggtcaatgtatccgcacgcccgcaatccccgttcgatcacgcgcatccactccggttctgtcagcacacgcacagaactgtcatccagttcgatcacatgctcttcccgttttgcgccggtctcacaggtcacctcatacagattcacccggctgatggcaccgatctgttctaacaggttcaccatacgatatacggtcgctgttccgatcttcggatctaatttggatgctttataataaatctctttgcagctggtgcagtttccactcagaatcacatccagtaaaatcatgcgctgttttgtgatacggcatccgttctcttttaatctgtcaacgatccgatctttctgcatctgcgttctgtaatagttttccgtcttttctaattctgttgcctgcatactagatttcctttctctatctttttttagtataaagcaacgtgtgttaggtgtcaataatgttttttattttttgcttattcagggtaactatgactcacgtgcaaaaaactccccaaaaccgataccgtttttgatacccgttttgaggagtttctcaatttctctatttgcgaaaagacagaatcatatctgttcttatccttctgttatttatgccttctatgccccaagcaatgcacagtaaaactctgccgcacaggaaaatgtcttctgacggatcggtgctaggatctcccgtacactcaggtactgatctgcacctgctttcacgatttcatccccgatctgttccagaatctcctgtttgctgatgggataggaaatatctgccatccgcttgtgcagtaaatgtaacattcctttaaactgtgccatcgttgtcacctcgcttataagctgtgtaatccgaagtatccagcccctttcctgcatacggatgactggatgcgccccggtgcgcataagaatacatcggtgcggaatgaaccgcctgactgcgcattgcatcgatgatgcccggatacagatccgccttgatcatagatggtgctccgtttgcgccctcacagatcacgtttccgtccggtcccaagatcatgcttcgtccaaagcaggaaaaattctcattttccgctgttccagaacagttgactgccactacgtacacctgattaaaataagcaccggatttattggtgatctcccatgcgttctgccacggatccatgtaatgggtcggacggatgatcacatttgcgccctgcacggctgcttcccgccacatttccggataatcgccatccgcacagatgataatgccaagttttgcacctttcggtccgtcacatacggtacagctgcgtcccggaatggaaccctcaaaaggaatccacggattcattttatcatagcggtgaatgatctcacctttgtcattgatcacaatggcggtattggtgtaattgttctgttcatccacccgaagcaggaaatcaaacactccgtacacttccagttccgcacattttttctgaaacctcttaatctgcggactgtccatggtaagcagcgcattttcccatccaaactgcgggaaaccctgaatgcacgcttccggtgctacaaacagatcaaagcccggaaagccaccggaagcccgatccataaaagaaagcagcgtttctgtattgcggtctacgtcttccatattcatggcaccgatgggcgcatactgcgcaccaacaacggtcaggcattctgtctcaattattccattgattccaaatacatttcctctgttcatattttgtacccccctgtcacccttcctgtgttcagctttatactcgtattcatacaattagcagtaatactttgatataggaaggtttatctgacaaatcattctttatttttctttattacagattttgcttccaataaagtaaataacgcatgctgcaacgatggaattgatagaaccgataccaaccggtactttcagtccaacgatagcacctgcaacaacggcaatgattgcataccattttacggttttcatatttgttgtgtcattttcctgataacgtctctgatgcatgaagtaatcagtgattaccacaccaccaaccggagggatcgcatatcccatgaaagtaagccaggaagtaaagttatagtataaccatacagaagctacgattccaatgataccgctgactaataccattttctttttggagcatcctgtaatattggaaagtccaagtccacaggaatataatccgttatcggctgtggtccagatatttaatccaagtacaatgatagccggaagtgctaatccctgtgcaatcataatatagaaaatatctgcctgtcctgttacggaaccacctactgcaccgaatacgaacatcagggagtttcctataaagaacgcgataactgttgcgataactgcgatttttcttgtttttgcaaaacgtgtatagttcggggttgttgtaccaccactgacgaaagaacctacaaccagtgtaatggctgttgccagtgtgatcggattctgcggttctgctgcaaacagaccaccaagtccgcccatagaagagacaccaagccctacagaaatgcatcccaggattccgactgccggaactgcgatccagcttacgatctccagagatttaataccaaaataagcagaagctgtcataagaccaccagacagaataacaagaactactaccggaataccagtcagctctgcaaccggaatggaaaacattgcgatacctacgccaaaccatcccatctgtgtaaatgtaataattgcggaacaaagccaggaacctttctttccgaaagcatgtctcgccatcagatccagggtaagtcctgtcttgcatcccatgtaaccaagaataccggtatatacgccaagaatcgcattaccgatgagcaaagcccatataaattttgtcatgttcagaccaataccaagctgaccgccgacactcatgctggcggagaaaaaggtaaagcccatcatgatcataaacattggcagaaaaccttttcttgcgctgtcaggtaccgcctgaagctcgtaatcctgctgtttctcatttgtctggttgttttccataacatcctcctgctcttttttctcgcaaaaaaggtgccaggagtacctcaacccaaatactctggcacctttgccgctctaaaatatagcatggtggttatactatgtcaaaaaaatatcaatccctgatgttattcttttttctaatatataaggacatatataatgaaaatgactacttatgttgtcttgcaaaatagtcctttaccagcttcacaaccgtacccgacaacaggaacaacgcgatcaggttcgggatcgccatcagaccgttgaatgtctctgcaatgctccagagcataccaaggtccatggttgcaccaacgattgccaccagtgcataaacgaccataaacggttttacccatttttcagaagacaggtactccatacaacgtgaaccgtacagtccccatccgataatagtggaaaatgcaaaacagcaaagcgcgatggcggtaaaaatagatacccagttaccatatgtagcggtaaatccggaaatagtcagctctgcacctgcatctgcgccatatccaaccgggataccactgcacagaataaccatagcagtcagtgtacagatcagaatcgtatcagtaaatacttcaaaaataccgaacataccctgttttaccggttctccagtgtctgcacatgcatgggcaatggaaccagtaccaagacctgcctcgttggagaaaataccgcgggctacaccttttttcatactcaggaaaaagcttcctacgataccaccggtcacagaagccggatggaatgcaccgtcaataatagaatgaaatactccaggcacacggtcgatatttaaaataataacgccaaacgcaagtacgatatataataatgccatgaacggaatcagacgttcagtaacacgaccgatacgttttacaccgccaagcaggatcatggctactaaaatggcaacaataatacccatcaccagattgacaacttttgtagaactttccggaataatattgaaactcagtaacgcggaatcaatcgctgttgtgattgtatttacctgtgtggcattaccggttccaaatacggttaatacaccaaacagggcaaacaaaaacgcaagccagtgccagtgttttttcagtccgttcttaatataatacatcggaccgccaacccagtctcccactgcgtttttctcacgaaaatgtaccgcaagggttacctcggaaaacttggtacacataccaagcaacgcggaaatccacatccagaataccgcacccggaccaccgatagcgattgctccggcaacaccggcgatatttccggttccgacggttcccgccagcgccgtacagactgcctggaacggagtcatggctccatcggaagcatcctttttatcaaaaatttttccaatggtctgtttcattgcatatggaaatttacgaatctgtaagaattttgtccgcacactgagcagaagacccactccgataatgcagatcatggcaggcacaccccagatgaaattgttcaccacggagttcaccgatttgataatttctaacattttttaacctctcaactcatttgtattctgtctgtgtccagaaagatttaaaaagtatagcacactttttttacaatgtacagattttaatacaaaagagaactgtatacaatggatttcttatgtgtttttcatgtacttttgtgaaagaaaatgattccattttgtctccgcggctaacaatcgcctgcgaagaaaaaatagaatcactttctaatctacatagtgaaataacaagtgtaaaaggatcaatatgctggtaagattgatgcgcagcaaatgttaagtatgaactgcttttgttcctaataaaaaatataaacatttataatgtaaaaagaagtatcgtattgtcgtgcgatactttttttacgaaagggttatattatatccatgagttatctgaattgctatttaaaaatctgctgttatgcacgattcgatcagatacaacttaatgtccgacctaaatgtgccagatatgcggaacattctttggtctgtttcataccttcactgatttctacaccacacagttcatcgtgtttcacacagaccagatgatggtttttgccttctttgatcaagtctaccgcataagctcccatcatacttccatagacacggtcttttgctgttggattgcctccgcgctggataaaagcaagcacatttgcacgggtatgtacatgtaattcccgctcgatgatctctgccatcggctctgcttttcctgcgccctctgccagcacgattgttccggaagtaaaatgatattttcgtaaatggtctacaatctgttctgccgttgtattgctgtctgcaaaaatagctcttgctgatcctgcaatgccgctccacagagcgataaatccggcacgccgtcccattacttctaccacgctgaaacaggaatgtgcttctgaggtatctgcgatacggtcaatggcttccactgcaatattgaccgccgtatcaaaaccaatcgtgtattccgtacaaccgatatccagatcgatggttcccggaacaccgaccacgccgattccctgcttggaaagacagtaagctccctgataagaaccatctccaccgattacaatgagatcactgatcccatattttcggcagatgtctgcagctttcttctgcacggaaagttctttgaactcatcacaacgggcagttcccagaatcgttccgccttttgcaacaatatgccgcacatcttctctgtgaagttttacgatatcttcccgtaacaatcccgcatatccattgcggatgccatacagttcatatcccaattcctgtgctcttccaaatatgccatagattgccgcgttcatgccctgtgcatctccgccacttgtcaaaactgcaatttttttcatatcagttccctgctcttcctgctattttccgtcatacttcatctcaatatgagttccatatctaactaaacgaaacaattatcctattctcagaatcttcctataataatacaaatatcaatctctgtttttaagcgatctctaatttttcatggaatctcttttcgtattccgcacccaatgcttcccgaaactccggtgccgcaatattgatcagcgctttcgctctctcccgcaatgattttccgtgtaactgtgcaacgccgtattcggtcacaacataatccacatcacaccggcttgtagtaacagctgcgccttctgccaacagcggaacaatcttggaaatcgttccttttgctgcggttgccggcattgccatgatcgtacgaccgccctttgacatatttgcgccccggacaaagtctacctgaccaccgacaccggaaatctgcttcattcctacggattcacttgccacctgccccatcagatctacttctacacaagagtttatggaaactacattatcgttctggcagatgactttcggatcattgaccacatctaccggcatcagattgacactcggattatcatttacataattatataaacgatctgttcccatcaggaaagttgccacgcactgtcctttctggatctgtttgcgtgcatttgtgatcacacctgcttcgagcagctctaccacaccatcggaaaacatttcactgtggataccaagatcttttttatctttcaaaaacagtaatactgcatccgggatcgcaccgattccaagttgcaggcagtcaccgtcttttaccagtgaagcaacgtgttcaccaatctttttctgaacttccccgatctttggcggtggaagctgaatcagatcactgctctctgccacaatgtaatccagtttgctgacatggataaaattatctccgtgcacacgcggcattttcggatttacctgtgcgattcttaattttgctgtctctgcacatgtctttgtataatcacaggatacgccaaaggaacagtaaccctgtgcatccggctcacttacctgaatcaacgctacatctggcggtgcctgtgtccggaaatattccggtgcttctgagaagaagatcggtgtaaaatccgctctgccttcttcaatcgcttttcttgtggaaccaccggcaaacaatgcgttatgccgaaaatgctttgccatctccggtgcgcagtaacctgcttttcccatggcaaccatatgtaccacttcgatatctttccagttcatctcatctgcgatttctaccatagcatctgtcagaatgacaggctcgctgcaggcatgtgctacagcgactctgtcacctgatttgatatgggatactgctttttttgcagtacagatgcgatctttatatgtaatcttccaatccatcttttttacccctgtttttatctatacacaatccggctttagaacagttctgtataaatcttgcgaatacggtctctgtctaagtatacaaagttatttactaacagacgctgctggttttcgataacggaatccgtaaactcatcaatctgagcctctgtcataccatactcatgcaacgatttcttctgaatgatcgtattcagtaatttttccagttcctcatatacatttgctgcatcacatccaaggattccggcaatgtaattattcagtttttcaatctcaccgtctgtcttgatctccatgtagttgttcataacaccggtaaacattgcataatttgcttctccgtgcggtacatggaaggtagcgccaagcggataacttaatgcgtgaactgctgcacaacctgcatttccgaatgcgataccagcatagttacttgccataaggaaatcatttaataacgggattcttgcctctttgccttcttttgcgatcttcatgtatccggtcaggatcatttcgatggcacggtaaccaaacattctggttgtctcatttcccttcggggaaagactggactcgatagcatggatcagggcatcaatagaacttgttgcgaatacgccaaacggaagtccttttaacagttccggaatcagaactgcctcatctgcatacatgtcatccactgccaaaccttttttggttccacggctgttcaatgccagaatggcaatgtttgttacctcacttccagtaccacaggtagtcggtaccagaaccagctctttatttttcactgccgggatttctccgtcatacagatccagaaccggtgatacctgacggagtgcaaacagtttggaaatgtccagaactgttccaccaccaatggcgatgacacgtttgtgctcacctttgatatcgcggcacattgcctctaccatatcatcggatggctctcccatgccgtatttttcctggaaaattacatcacatttcagattcagacctccgaaatacggattgtaaatatattcgtttgtaacaactaaatctccctcacccaacataaaatcctctgcaaactcttttgcagtatcataattataaatgtccggtttcaacattaaagttttcattatacctatacctccggtctggcttccctttactttctggaaataactttctttactgcctctacgatatcttctgccatcagattgtactctttcatcaggaaatcctgtggaccaacctgaccgaaacggtcctgaataccaacacgctccatcggaaccggtttgtttgcaaccagaacgtttgcaactgcggaaccaagtccgcatccaacctgatgattctctgcggtaacgatgcatcctgtctcttctgctgccttgcagatcagttcctcatcgattggtttccatgtatgcatatcgatcacgcgggcagaaataccttctgcgcttaaaatttcttctgcacgtaatgcttcatccagcataattccggaagcaatgattgttacatcttttccatcttttaaggtaacgccttttccgatttcaaactctgaaccatctgcataaatggttttgaaatttttacggatcagacgcatatagcttaacttcggatactctgccagtttctttgtcaaagattttgtctgtacataatcacaggaatcaatgacaaccgcgcctggaacagtcatatataaagcgccatcctcgaacggcatatgtgttgcaccgttgaacgctgcggttacacccggatcggagccgatgatatgtaccggaacctgagaataaccggctgccagaaacgcctggtcaaagcaacggcgtgctgcgaaacatccaaaggaatgtacgaatgctttcatgcctgctgctgccataccggaagcaacaccaacagcattctgctctgcgattccggcattgaatactctgtcggggaatttcgtctgaagttttcctacgttgatacacccgcccagatcacagtctacatgtacgattgtcggatcattttccatcaactctgtcattgcagcgatataaccatcacgatttgctcttgcatcttttttatgttcacctatcaatgtataactcataatcgcttcctcctttactgagcacgtactgcagcaagtctttcttctgctgccttgattgcttcttcccattcctcttccgacggctgagatgaatgtgctccgatcggttctgcaaaagttgcaccttttcctttgatcgtatttaatacgatacaggttggttttccttctgtctcgtatgctgccattactgcatcgtaaatctgtgaaacatcatttccgtctgctacattgatcacattccatccaaaagcatcgaattttgcgccaattccttttgcatgacccataacctgctcacaggtaccgtcaagctgtcgtttgttatcatcgatcagacagatcagatgatccaatttataatgtgctgcaaactgtgcaccttcccagatctgtccttcgtctgcctctccatcacctactgtgacgaatacgtggcttgttttgcctttcattttatttgcaagcgctgcacctactgcctcgctcattccctgtccaagagaaccggtggtcagatcaacacccagtgtcatacgacggtctgtgtgggatgggaatcttgtatgcggctggttcagtgtgtatgcatcctctaccggataaaaacctttcagtcctaaagttgcatacataaccggtccgccatgtccctttgataatacaaaccaatctctgtcttcccaacgcggttcttccggacggacattcattacttctccgtacagaactgccatggcatctgccagtgacatggaaccacctacgtgtccgaaacctcttgagtgaatgatttttaatgtctcgacgcgaatttcttccgcaaatacttttaattcatgtactcttttttctgccaacataatgcgctcctttcgttcgttcgctaaattgtataccatttttgaaataatatactttctgtttgtaatatacttctgtatatcatatatgtcaattatatttatactatccaccatttctttgtataatatacacaatttttagtggttactttttttgcattttttaatattgcaatcattttcacgcattttaacatcgatttttttgcattttttccattgttttttgcaattttgcattattttggtatactattttggtatactatcttgctcattaacaaactttttcattctatactgac

SEQ ID NO: 13438 - DNA, 2087 bp, Unknown
  gut microbiota DNA sequence
cctgctatttatatagaaaaaacattacaaaaagattaaaaataaaaatagttgaaataatgttaattaacaataattataccacatttgagcattaaggaaaagagatacaaatcatagatttcgattgacaaataatcgggggacttttacaattatcttaagcaagggaaaatcgttatatagaaacgaggaagaaaaatgaatgaaaaattaccgatattgaatgttcacatgcttggggatttttctgttatgtatgggaatcaaccaatatcatttggaaagaacacaaccacaaaagcaatgaaacttttacagattcttttgtatcatggggaacagggcatttccagagaaaaactgctgaacgcattgtatgtacgggaagaactggcagatgcctcgaacaaccttcgtgttacagttcatcgtctgaaaaagatcatcgttgatgcaggacttccggcagatgaatatatacacataaaaaagggtatttacagctggcaggcaccgatgagagtggaagtcgatgtgaaacgatttgtttccttatataaagaatcaaaagaatgcacagataaggaacgtaaagaagaactgttaacacaggtctgccagatgtatcacggagaattccttccggcattgtccggggaagaatgggtgcttctggaaagtattcagtacaaaaagatctacagtgaatcattaaaggaactttgcgagagcctgatgacaaaaggtgaatatgaagaagtgctggcactgtgcgaatctgcatgcaggatgtatccgtttgatgagtggcagtcagtgcgtattgaatgttttatcaggttgaaacgttttaaagaagcgttaaaagagtatgaggatacagcaaagcttttctttgaagaacttggtattacaccgtcggatcgtttactgaaacagtttgacgagatgagtaatcagatgaatcataccaatccgagggaaattaacgagattaaggaacgtctgaaagaagacagtgaccgcggcggcgcttactattgcagtctgccaagtttccgcgacagctaccgtctggtttccagaatgttagaacgaaacggtcagtctgcatacctgatgctgtgcagcattacagatggcaaaggacatccgatggaaaaaccggagaaactggcagtgatggcagaggaattacaaaactccatccaacacagtctgcgtcggggagattcttttacgaaatacagttcttctcagtatctgatcctgctgacagggacaaataaggaaaattgcggaatgatttttgaccgtctccgaaaatatttttcacgggagcataaaagctgggtaaaaaatctggaatattttgtgtcctctattgcagatgtggaaaaaccggattctccgattcagtttcaaaaggataaaaatgtatggtaacggatgaaatattccatgacagttatcatataacaatatttgatgtatgaatacgttatgaagtgatgatcagagaacttggaaggggaatggcatgaatatggagcagaagcagtcaatcgcctggcatgtgccaaacctgctcagcatttgcatcgacagcgttgcagatggcgaaatgtcaggagagatttatcattgttacaagaaagaaccattaaaattcagcaatatcattcggatgatcgaaactgcggataaattttttgatcagattaaatttccacaatcagcgacacagatacgttcctttgaaaaaaaagaaccaaccatggaagctgtaccggaaaaggtttgtataccccaggaagtgttggaaaaacgcggtgcgaaaggcacatttttactgaatgtgaaataccgccagaattcatcctggcagggcgtgattcagtgggtggaaggggatttgacatattcattttccagtgtgctggagctgctgaagatattaagtaatgtgatgcaataagttgttttataaacagtagtaatgagatgattaataaaagcggattttcgacagatgtcgggaatccgctttttacatattccttatacagacagaaaagaaattt

SEQ ID NO: 13439 - DNA, 741 bp, Unknown
  gut microbiota DNA sequence
agttaatgcataatgtcgaaaagtaatgttttgtgtaatgggtggtaatatataatgctaatatacaacaaagatgatagataagctggaaagataagaaggtactgacatgagtaatagacagaaaaagacagaaacatttattataaaagtcatggatcagcagaatgcaacctggcagggcagtgttacctgggtagatgaacagcgagagcagtactttcgaagtactctggaactgctaaaactgatagatggtgcattagaaaaacgtaatgatgacgaagaaaacagcgatgaagataaaaggaggacgccatgaaacatacaaagaaaaaacggatattggcaatcgtgctttgcatgatactggtgttaagtaccggaatagcagcctttgccaatgaaaatgttggacttcagtctgttgcgtgtcaggcagcaacgctggagcgagtaataaaaaatgcagagggtgaagatgttggaacactgatcgcggatattccggagggcacattcctggcaagttcatcggacgcaaatatacagatggatgtacaggcagaccccggtgcagacggtgttcttgaccgtgtacagcagcagcttgaggcaaatggtgaaacaggttatacactgaacaattatgtgatggctgatgttacattttatgtaaacggtgaaaaacaggtacctcagcagccgatcaccttcactgtaaagggcacaaatcttgac

SEQ ID NO: 13440 - DNA, 1003 bp, Unknown
  gut microbiota DNA sequence
ggaaacgcacctattccatgattcgattgcaaacaatatcgcaatcgcaaagccgggagcatccagagaagagattatggaagccgcaaagaaagcgtctatccacgatttcataatgacacttccgaaaggatatgatacagaagtcggagaactgggtgatacgctgtccggtggtgaaaaacagagaatcggaattgcaagagcatttctccatgaatgtcccctcatcctgctcgatgagcctacatcgaacctcgactctttaaatgagggaattatcttaaaatcattgaaagaatcggccaagaagaaaacagttgtcctggtatctcacagagtatccacaatgaacgtggcagatgtggtatatgaaatggagaacggcagaatttcttaacagcaggaatggagaagaaatactttccgaaaggggagaaagtagtatatgaaacttggagaatccaaagaggattatctggaagcgatgtatatcttgaaacgtcagaaaggatatgtccgtaattttctgctttgtaattatctgaactattccaaagcaagtgtttcagttgtgatacgtggattggtggcagaaggatatgtaataaaagatgaacatggctatgttgaactgacggcggaagggaaaaagattgctaaaaaggtttatgcaaggcatttgcttttgaaagaattcttagaattgataggagtatctccggaaactgcaaatcacgatgcatgccggatggaacatacaatcagtgaagaatcttttcagaagattcaggagctggtgaagaagataaaaaaggaaaatgcatcgaatgaacaaatgcaattaacgaattaaatcaaaaataggaaaggcggtggagaaatttcactgccttttctgttttgaaaatgaagtaacgtaagaaaagggatacaaaaaaagtattgattgctgcggatgaggtagataagcggaaagcagcttgtaacctttgaagaactg

SEQ ID NO: 13441 - DNA, 20835 bp, Unknown
  gut microbiota DNA sequence
cgtctagctttctgacaggattcttcgttttcttaattatattaaaattttagccaaaacaatgacaaacaaaaagttattttttccaaaaggcatccagtgctccgggcagactctccagcgtatgcacctcatactgactccactcccgcggaaacagctgccgataatcattccgcaaaaaacgctcatccagcagcccgataattccccggtcagatgccgtccgaatcacacgccctgccgcctgcagcactttattcatccccggatactgatacgcataatcaaatccctgaccgttttcttcctgataatactcctttaagatttcccgctgggtacagatctgcggcaatcccgttccgacgatcagcaccccgatcagtaaatcttctttcaagtcaattccctcagagaaaataccaccaagcacacaaaatgccgccaatgacctgtcccttgcttcggcaaattcctgcataaatgcttcccgctcggcttcattcatatttccgttttgtatcatacagtctgcttcccgctcattgaccgccagaaactgctcatacacatcctccataaaccgataagacgggaaaaaaatcagataattacccttttttgcccgcagcacctgctgaatatacagcgcaatccgccgaaattctccaatcgtccgccgtgtatacaagctgctgacatcccgaccgataaacaacaaccgttgttcttctcgaaatgccgaatccgcatataccgcataattatcctttttcgaactgagcaggtttttataataattcaccggcagcaaagttgctgagaaaaatacggtgctgttgccccgctccagacattcctgcagattcaccgatggattcacgcagtataaatgcagacaaaaccggttttcatcatcaaaatctgtatacattacatagttttcatccacccgctcaaacatattcataaaatgacgcagattcagataaaaatctgtaatcgccttccgctccggcatttcccctctggactgcaaaaacacatccagcagagacatcagccgcatcagggaaaacgcaaaggctccgatactttcgtacactacatatttttcacattcccgcttccactccagcatctgccggttgcatttttccagtgccgcctccagcttccggtctttgccgcgcaccagttttttcaccgcaaggatctcttccttgatcagaacagcactgtacatctcccgaccgcgctctaccagattgtgcgcctcgtctaccagaaaaatataatcgcccttttctccctcggaaaaaaaacgcttcagatacacattcggatcaaacacataattgtaatcacagataatgacatccgcgtacagcgatgcatccagagacatctcaaacggacacacctgatatttttccgcctgctctaacatccgctcccttgtaaaatcatcttctgtggtgatcagatcatacaccgcatcgtttacccggtcataatgccctttcgcccgtggacaattggatggattacaatccatctcctcgcagggacacattttctcctttgctgtcagtacgatcactttgctctgatatccatgtgccttcagaagatcacaggtatcctttgcaaccgttcgcgtgattgtttttgccgtaagataaaatatcttatctccaagattttctccaacggcacggatcgccggaaacagtgtggaaatcgtcttgcccgttccggtgggcgcctgaataaacagtatttttttgcggttgatggttctgtatacatcccccaccagtttgcgctggccatcccggtaaggaaacggaaactccagcgtctggatcgatgcctgacggatttttctccatgcaaactgaaaatccgtccatttccgatacgcctcgatcatatcctgaaaccatctctccagccagaaaaaagaaaaactttcctgaagccgccggatttcttctgtatccagatcacagtacgtcatctgcacggaaatctgatccaaaccattctgcaacgcataaatataggcgtagcacatcgcctgcgccttgtgcacaaaaatcggttcctcaaaacgtgtcacatccgtatacatgcacttgatctcatcaattgtcacaccttcctcgcttgtgataatgccgtcagcccggccttccagcgccagcacatactgctcctgcggcacttccagtttcagaggaacctctgcacgatattcaattcccatccgtccctgaattttgcggtgcatccggctgccttcctgcatagcctctttttgcacaccttttccaattcgattgtcaatatctccagaacgaaaaataaattccaccagatttcgcacggaaatccgtattctcgtcaactcctgctgctctctctcatccgtattctctgtttgtttcataaataaccgctatccgccttttttcactctaagctaaaccaaattcgagaacgctgcctgtcggttcagcaaactgctactagtgtaacacatatttcactttttttcactgcaaagaaaaaggtcgcattccctaccaaaaggaatacgaccctatttatatcatctctattttttctccaattgtagattccggttatgcagctgcatattttctcagaatctgctcaaaattaccatcgtttccgccataagatacggtaagaattttagaaagtccaagacttaaaaccccaagaaatgattttgcatctacgatggcacgctgatagtgcaggttaatatcaaaattacattcggatgctgcattgacaaattcctgtacttcattggttgcatttaatttaattttcttttctgtcatgattgattcaccctttctctcaatctgagttgaattgagttcacccccatacaaaatggaaaattggtaacgattccattttattttgttccgttacactttatgcaaatttcccatgtcgggtgcattattacatgatattgattttttgtcaaatcagtaattttcaaattttgcccctaaatggtacttccaattgtaaaattttctttacgtttcgtggattctgtcaacgatttttcctcaagttctttccgtttccgtcagattgctcttaacttttaggttctatcgccgataagttttgattttcaaaatatttttcataaacattttactatttcaggcaaattcctgcgcatactgcacaagtcacattactaccagctaagaaaaatggattttttcaaaaatatctattgacaaattgcaatctattgtgtatagtaaagaagttcgtgtggcgagatagctcagttggctagagcatgcggttcatacccgcagtgtcgagggttcgaatccccctctcgctactataaagatctgtaagatttcttataggtcttttttatgttcaacagaaatcgggctatcttttctccgaaagcgattgttagctgaggagacaagatagcccgatttctttcataaactttcataaaattaacgtttcaccacgtaccttaaaacggtcgaaaacaacaacaattcaaaaacatcataaaaccacaccagatcgcacatattcttgacaatcccgataccggtttctgataactggaacccatattctgataccaggttccgccaaattgcagattctgcaaaaactgccgatactccatattactcggctccattgccacagcctgctgtgcatgttcctgagccaccacattattaccggcaccctggttggcaaccgcggaaaagaaataccaccgcgcgctacgctgtcctgccggaatatcattcaaagcatgcagggcctctttgtaatatccatttcgaatatagttcatcgccgcctgcatattgaccggatcattctgctgggagcgctgctcattctgtccggtaaaatcaccaaagccgccgaaaccgccatagccgccgtatgcaccatatgcaccatatgcaccatatggtccggactgggcgcttccattctgataaccgcctgcatatccctgctgcttttccttcatgatctgtgtatatgcctgctgaacttctttaaatttttcttctgcaatctccgggtgcggactgttgacattcgcatccggatgatactgtctgctgagttttcggtatgccttttttatttcttcatctgtagcaccgggtgatacacccagtacttcataaggatttctcactgagatttcctcctctttttcttctttgcctgtacatattcatatttcgaccagacaccggaatataatatattacggataatggatgcatgacgcaaaatcggaagccgttcaaaagatttcgaacattccgacatcatacttgtcaggatcagcttacttaacgtatcaaaatcctttggatcatttttcaccatagcctcaaacggattgtactcttttttccgaagatccttctccagatcttcatatgcatccatcagataaatgaattttcccatataaaatccaagacaatgcagttcctctgcccagatatcgtctttccaagaaaaaatttcgccaagcatctcgccggtcagacccgcgattgcatccagattggtctcacgcttactctccagcatattcagcttccgcatatatgcttccacagcctccacctgacacggatattttctggaaattctggcgtaatcttttttcagcattatggacatcacatgttttggataattcttctcatcctgccagtcatctaacagattgtgataagaaagaaccacattcatatcagaagcatactgtgtcgcttcgttgatatatgcaattttctttttaccggggtgaagcggacaaaaaaattcttcttccttattttccagttcatataatccggaaagcagaagaatcagaaatgtcatatcataattcaacaacatctgcgcttttacaccactgctttttttcagaacctgacacagtccacagtaataagactgataatcttttctgtcttcctccgacagttcttttcggtttacataaatatatccgaacatggtcataccccttgcatcatttattagcttctttttataaattctgtcttacacttcggacaggtaatacagatttttccttttcccttcggtacacgtactttctgtgcacagttcggacatgaaaaaaaacggtaaatctttttctgctcctgtctgtatttcatctgtgctcgtttctgtgcaaaacttgcagaaccggcagatccgccatattttcccttcttcaccttgcagacaacccgatatttaaaattcaggtatttctgattctctgctgcacgctttgatacgtttctggaaaacatacgataatagcaccagaaaagcaatgccagcgccacaatctctacgatcggtctgcggacaaatatggaaacgaccagaacaatcaatgccaccgttgataaaaaacgattgagctggtccataccataacgtccatacataaattgttgaaaacgatttctcacctgtaacacctctgtctcttttattttggattcatcttttgttttataacatgtatctcgttgaaaaacattctaaaaacaggaatctttgttcctcattttggaaccgataaccttatgttacagtttgcacaaaacactgtcaacaaacctattgtcttttcacaaacattttagaaaaagtttacgaacacccgctgttttatgtatacagaatccacatttttcctgtaatcatccggaatctaaatagaaaaaaatacaattcaagcaaaacgataagccgggttatgtcgtgaatgatcatctatccaggataactgttgccagttacctcaagcgacctacctaaagctggcgggccacgtcaacgctttgtttcggtcttgcttcggatggggtttacatgtgccccggctgttaccagccgggcggtagtctcttacactgcccttccacccttacgttaacaatgagcgatacacagaatcctgtttttctcatcaaattttctctgtaagccagcttactcaaaaatctgctgaaaacgtgtctgcgcatggctcattgctaacgcggtacatttctgttgcactgtccttggagtcgcctccaccggatgttatccggcatcctgccctgtgaagcccggactttcctcacctgcggtctttcgacacttgcagccgcgatcatttgtcttacttgaattgtattttatttttctgttattctatttcctatacatggaaacagcttccaccgataaattctcttaaaatagaattatgtccgatattctctcccggaaccggaaggaaataatcaaggaatttcagaaggcgttttgcctccggatattccggacaggtcgtatcgatagaaaagagcaaaggctccgcatataattttaacacagataattcataaatcaaggctgaattaaacataatatctgcttcttcctgatatgggaagatatttttttcttctccgcggcgtacggaatgccaacgtgccagcgtttccctggctgtcgtgtttcttgtacgcgcatcacgcaccatacgacggatcagacgtccgtctgccgtggaaagattattatgatcatcaatatttaactgtgtcaatgcactgatataaattttgtatttattttctttcggcaattcataggaaagtttttcgttcaatccatgaattccctcgataacaagaacatcatccggtcccattttcaacggtttttggcgatattccctgtgaccggttttaaaattaaataccggtaatgttacttctttacctgccagaagatctgtcatacattgattaaacaggggaatatccagtgcttccagacactcgaaatcaaattctccgttctcatccaacggtgtctcctcccggttacagtaaaaatcatccagtgagattggatgtggttttaacccatgcgccgtcatctgaatggacaaccgatgagaaaacgttgtttttccggaagaagacggacctgcgatcagtacaaatttctttcttcgatctgatgcgatcgtctctgcaatgtcaccgatcttctgctccatgtaggactcctgcaccagaatcatatcctgaatccgtccggaagcgatcacatcgttgagttctcccacggtacggattcccatatcaatcccccactgtgcagaatcattcaatgtgttaaacaatttgtcagaagcagaaaactctgccacaaccttcggatcttttcccggaaacatcagcataaatccattctgatacagcagcaggtcaaaatactccagataaccggtactcggaaccatgtagccataataataatccggaaatccctgtaattcatacacattgactctggaactgcggcgataacgcatcagacgcactttatccatacgtcccatctcgcgaaatcgtgccgatgcatcctgtgtattcatgttgtactttatgattggaagatccgctttcacaaaatcctgcattttctcttttaaagaggaaagcatcttccggtcaggcacacaaatggcatccttgtgacgaaattcacaataatacccctgaccaatggaatgctgcaccagaagctccagatttggatatagcttccacgctgctgtctccatcagcaatgttaaacttctgcgatacgtatccttgcctggtttctgatctgcggtaacaaattccagactgccatcccgcaaaacggactggctcagttctttgagatcattctgaaactttacaagcacgattttattttcaaactgtttctgatactcatctgcgatctgttgaaacgtcgtatccagcggatactgctttgtttctcccctaatcgtcagactgcacactttctgttccataatttttcaatgcctccagaatcaacgtttttttacagttcacctgctgcattctgtttcggattctttcgtgatccggctgtgccgataactgttcaatcacactgtttgtagttcgcagttcccgctccagccattctttcagaaccggatgccgtttctgtaacagaaccggtccgaaagcatctgccacttcctgcggcaatatttttgtctgctccgctgctttctgctgactcaccttcatcatcggataatattttccatcctccagaatcatatcttcattcaggatctgaaaattccgtacgcgtaaaaattcacgcaccagtgcgatttccgactggggctgcaggatcaattcttcctttccggtcaatttttcggctccttctgataaaattttcatcacaagtccaccgcccatgccggcgatcagaatcgtatccgcttccccgaactgtaaggcagccattccatcggacagacgtgtcttaatctgttcggaaagcccgtgctctgcaatatgtgtctgtgcctgctgcagcggtccctttccgatatccatggcaagtgcagacggaattttccccgtctgacacagatagatcggtatgtagccatgatccgtcccgatatctgccagtcggtttccgtctgtcaccatatttgccagtgcctttaaacgcttcgataaatgaattgccatattaatccagataatcctttaattttctgctgcggctcggatggcgtaatttccgcaatgcttttgcttcaatctgacgaatacgctcacgggtaacattaaattctttaccaacttcttccagtgtgcgggcacgaccgtcatccagaccaaaacgcagacgtaatactttctgctcacggtctgtcagtgtgcttaaaacctccactaactgctcttttaacagggtaaatgctgctgcatctgccggaaccggtacattatcatcctggataaaatcacccagatgactgtcttcctcctcaccgatcggagtctctaaggaaaccggctcctgagaaatctttaagatctcacggacacgctctaccggcatattcatttcttctgcaatttcttccggagtaggttcacgtccaagctcctgcagtaactgtctggacacgcggatcagcttgttgattgtctcaaccatatgcaccggaatacggatcgtacgtgcctgatctgcaatggcacgggtgatcgcctgacggatccaccaggttgcatacgtactgaatttgtatccttttctgtaatcgaatttctctaccgctttgatcagaccaagatttccttcctggatcagatcaaggaacagcataccacgtcctacataacgttttgcaatacttacaaccagacgcaggtttgcctctgccaaacgtttttttgcctcttcatcaccaagttccatacgttttgcaagctctatttcttcttctgctgtcagcagtggaactttaccgatctcttttaagtacatacgaaccggatcttcgatacttacgccatccggtacggagagatcgattttctccatctccacatcattttccacatcctcgtcatcgatgaggatatcgtcatcatcatccgtaatacgaaggacatcgacatggtttgcctccagaaaatccagaatcttatcaatctgctccggactcagggcaaaatctttgaaatggtcattgatttcctgatactcaagcatattttttttcttttttgccagtgcaagcagttcctggagttttgcctgaaatttttctgcacgctctgctctttctctcattttctgatcgtttttctctgccattttgttcatccttccatgtttttagtctgtatagtttgtcctcaatcaagtgaaatatgcattttctgaagtatggcaagctgcttcttatcttccacgattttctgcaaccctgccagatcagtcggatccagatttctggaacgcacatccatgctgtgtttctttatcctgaggatcgtttcttttaatgctttctcccgctcctgccgtgtctccatcggatgcaggcgggcatgaaacaaggcggcggcttcccgctgctgttcttcatccgtaaaacggctgatgatctgcgccggatttatttctccctgtgcatgctgttcatacacaagttctgccacttcccggaaaatatcttccgtaaaatcatctggtccaatatagtcttctgtgagggcaaaaagccgctcatcttcgatcagccaggtcaggaataatttctgggactgcctcataccatcttcttttttcttcttctcattgattccgctctttaacggaactttttccctttctctggtgatcccgccccgggttccctccgaacgtaccaccgaccgcaactgttcaaaaccgatctggtattttgcagccactgcctcaatataattttcccgttccagttcttcctcaaaattcaggattttctgggcaacggcatagaaaaatttcgttttgctctccggatcagacaggtcataatcccgctctaacatccgtacttcaaacataaagctgttttctgcctcatcgatgcgtttctggtattcttccgcaccaagtgccttgataaattcatccggatctttatatgggcgcatattgatgacttttgccgtcaatcctgcttcttttaaaatcggaatagcacgcagggcagctttcaccccggcaccgtcactgtcaaaagtcagatatacttccttcgtataacgtttcagcagatttgcatgcccgtttgtaaaagaagttccaagggatgccaccgcattgtcaaatcctgcctgatgcagcgcgatcacatccatatatccctcacagagcagaatatgcgacctgcgggatacccgcgcaaaattcagtccgtacagattccggctcttgtcaaaaatcatggtttccggagagtttaagtattttggttctccctctcccatgacacggccgccaaaaccgatcacacggttatttgcatccatgatcgggaacattgcacggttccagaacttatcgtgtccgcctctgcgctcatcaatggataccagaccactgtcttttaacagatcatcttcatatccctgttttttcagatactgatagaggtcgtcactgaatttattcgaataacccagtccgaaatgctgcattgtctctttgctgagctgacgctcctcaaaatatcgcagcgcatgtactccctgtgggctccgcagcagcatgtaaaaatactttgctgccactttgttgatctccagaagtttgcttcgccggtcagcagcttcccgctgtgcggcagacatctcctgctttggcagttcaatgcccgcacggtctgccagactctgcattgcctcctgaaatgtaaaattttcatattgcatcataaaggtaaatacatttccacctgctccgcatccaaaacagtaatacatctgttttcccggcgacaccgaaaacgacggtgtcttttcgttatgaaacggacaaagtccaaaatacgtacttccctttttctgaaggcgcacataaccggaaataacgtctaccacatcatttctggaacgcacttcttcaatcaattcatcggaatagtaagccatagtaccttccttcattctgtcttgctcttataaaaccaacacatttttcctgtttgtcgattttttgttaaaaccactcactgaccatttattctgtcagttaatatacctgccaggattttggcataaaatactcattgtattttgcgaccgcatactggtctgtcatgcctgcaatataatcgcagacaacgcggtcattttcttcgccttcttctaacatttgcagataataagccggcagtacatcgatatgcttcagataatagacaaacagacgctccaaaagctcctttgccttggtttcctctcccttcgcaatgggattggtatacacactctgaaacataaactgacgcagtccctgcatggcatccgccacctctgatgacatacagatattatttcgattcctgctgtgatcaatgatatcatgaatcaacgtatttaaccgctctctcgtatcaaatcccagaatttcccggtattccttcggaatatcttcctcccgcagcacctgtgcccggattgcatcatcgatatcatgattaatatatgcaattttgtcagataaacgcacaatttttccttccagcgtagacggcatcagactggtctggtgattcaggattccgtcccggacttcccatgtcagattcagtccctttccatccttttccagcttctccacgatgcgtacgctctgctcattgtgcttaaatccaccggtacaaagttcattcagcatgccttcccctgcatgaccaaatggcgtatgccccagatcgtgtcctaacgcaatggcttccaccagcgattcgtttagccgaagcgcctttgcgatggtccgtgcattctgtgacacttccagtgcatgtgtcagacgcgtccggtaatgatctccctgcggagataaaaagacctgcgtcttatgctttaatcttcggaacgatttacaatgtaagatccgatcccggtcacgctgaaaaaccggacgaatatcacattccggttcttctctgtctctgcccctcgtattttcactcagagttgcataaggactcatatatgtacgttccaaatattccatttcttcgcgaattgtcatagaaattttatactccctgtatcgtttttcacttgacaaaaaaacgtcttatttaatagtttccgtattcttttcctgtttccttttttctattttaattttttcatattttttctactttagagcctacattcgcaaaatcgcttttacgaagcttttcttttgctcatgtttggtttcttaccaaatagattcataatcaaaagtgttcattcatgcaagcataatttacgcttctattatggatctgcccggttctgaagaagttacacgtcctcgatctgccagtcgatcggctcaattccgtttttctccagaaatgcattcgtctgactgaaatgcttacatccgaaaaatccgcggtacgcagacagtggacttggatgtggtgcttccagaatcagatgctttggattattcagcatgctttttttcatctgcgccggacgcccccagagtaaaaatacgatcggacggtcctgtgcattgactgcacggatgacggcatccgtaaactgctcccatccgataccacgatgggaatttgcctgatgcgcccgcacggtaagtacagtgttcaacatcaacacgccctgtttcgcccattttaccaaatatccgttattcggaatcttgcatccaagatcatcatgcaattcctgataaatatttaccagagacggcggcacttccacatccggttttacagaaaaacagagtccgtgcgcctgtccgtcattgtgatatggatcttgtccaagaatcactactttgacatcctttagcggtgtcagatgaaaagcgttaaaaatatcgtccggattcgggaaaatctgtctcgtccgatattcttccaacactttcttatataaatctttgtaatatggtttcttaaactcttctgccaatggctgctgccagtcatttgtaattggtggcatactctctccccctcgattcctgataattctgcatacagcatatgtttgcagaaactctttttctatctaattctatttgacttgattccatcatttccgtgaaaaataacctgccattctttaacggcgcacagacacacctttttctgccagataatttttcagatccatgatctccagttctttataatggaacagggatgctgccagtgctgcatctgcctttccttccgtcaacgcttcataaaaatgctcttttgtgcctgctccgccggatgcaatcaccggaatcgatacattttccgcaatcagacgggtcagctccagatcataaccggcttttgttccgtcacagtccatgctggtcaaaagaatctctccggctcccagcttgtctactttcattgcccattccacagcatcgattccaacgtcgattcttccaccatttttataaatattccaaccgcttccgtcttctcttttgcgggcatcaatagcaacaaccacgcactggctgccgaatttgtctgccgcatcagaaatcagatttggggtattgatagcagatgaattgatggaaattttatctgcgccttctcttaataacgcacggaaatcatcaacggtacgaataccaccacccacggtaaacgggataaatacattttctgctacttttcgtaccatatcgacaacggtatttctggcatccgaagaagcagtaatatccagaaaaaccacctcatccgcgcccgctttgtcataagctgctgcgatttccaccggatctccggcgtctcttaaatttacgaaatttacgccttttaccacacgtccattgttgacatccagacatggaataattctctttgtaaacattatgcacgtcctccttcgattccagcaaaatttttcaggatctgtaatcccacggtactgcttttctccggatggaactggcaggcaaacaggttgcctttctccacggatgcatgaatgcaggtgctgtactccgtggtcgccttcacaatttcaggctcctcggcatgcagataataagaatgaacgaaatatacatacgagtgttcttccattccggcaaataatctgcccttgttatggaagtcaagggaattccatccaatatgtggaatctttaatccctctttatctggaatacgtctgatctgaccttttaacaaaccaagaccttccactcctgggctttcctcactgctctcaaaaagcagctgtagccccagacagattcccaaaaacggagtctgtttctcgtttaattcacgaatgactttgtcaagctccagacgtttcagatttgccatggcatcaccaaaggcgccaacgccaggcaggatcactttatccgcattcaggattgtctgaaaatcacgggtgatcacgctctcctctccgatatgcgccagcgctttttccacgctttttaagttgcccgcatcataatcaataattgcaatcatctttttcactctccctctactttgtgctcagctccatccagaattccacaccgtcttcgtgattaatcacaccacactgctggtggaaggaatccataattgcttttacaatggacagaccgatgccgctgccgccgtattctcttgtccgcgccttgtctactttgtagaatttcacccagattttatcaatatcatcctccgggatcggctgaccggtgttgaatacgctgacacgcaatttatcttcgaaacgtgtgtagaacacacggatcactttttcaccatccgcatggttaatggcattgctcatgtagttcgtaataacttcttctactttaaattcatcgccccatacccaggcttcttccggattgtccaactccagacgaatgcctttctgttccatcaagattttagtcgaatttgccacaccgcgaaccaattctgtcatatcaaaacgctccatgactacctgatcatttccaaattccaactgattcaaagtcaagagcttcttgaccatacgattcattttgtccgcctcatcaataatgacatcacagtaaaactcacggctttccgcatcatcattgatacattcctgcagaccttccgcatagccctgaatcagtgccagcggcgtctttaattcatgagatacattggacaaaaactcttttcgcatctcatcaatctgtatcttcttttcaatatcatcctgcaattctacgttagcagtttttaactccgaaatcgtccgttccagattttccgacaaacggttgatatgatttcccagttcttccacttcgtaactgttggaacggttgctctcatatttcgcattaaagtccaaatctaccattcgtttggaaatatccgtcagctgctgcaacggttttgtaatatgtcttgtagtaaaaaatgccaccagcagactcgacacgatagctgccgctccgacaaacaacaggaaacggttggaaatagccgcactttcccgaatgctttccaccgcagtacgcatcagaatcatatcaccattttccagtacacctaccagcaccagatattcggaatccagacgggtatcgttcttacgcagtaactgatactgatcgttggaatacagcacttccatatcatccgtatgaagcagaacattccagagttctccccgcaaggcatccagatcattgaccgaagaacgtaaaacttttccatccggttgcaagatcagtgtcataatattgccgttggagcacagattatcaaaagttacggtaaactcatccgattccagcttatcctgctcactggcattggaaatcgtctcataattttccatcagcacatgttttttattgtgcatataataacgtggcagtaacgtggtatttagtacccagcaaagcagaattgcccctgctaccagaatactgacaatagacgtgatctgccgcgtcagagaatgttttttcatagtactcctttatcttctatacctcgaacttatatcccattccccattgacatatcagcgtgtctgatatgggcgcgtatgcgcatagcatgaccatcaggtctcagaccatatggggaataaaaatcacttctatacctcaaacttatatcccattccccatatggtcttaatgtattcacctttgtcgcccagcttactgcgcagctttttgacatgagtatcaatggttcttgcatcaccgaaatagtcgtaattccatacattattcagaattttctctctggacaatgcaattccaacattttccataaagtaggtgagcagttcaaactctttgaaactcatttcaatatttttaccgtcaatcgttacggtatgcgcatttttatccagacaaatacctccaatttcaaggcttccctcaacactgagctgattcgtacgacgcagaattgcttctacacgcgccacaagaatcttcggtgaaaatggttttgaaatatattcgtccacgccaaggtcaaagcccatcagctcatcgctctcatcacttttcgccgtcagcataatgatcggcactttggatgactgccggatctcacggcagacttcccaaccattcattttcggcatcatgacatccaaaatgatcagtgcaatgtctttatcctcataaaacagatccagcgctgcctcaccgtctcctgcctccaccacatcaaaatcgtgttttaccaggaaatcacgcaccagcttgcgcattctgctttcatcatcaaccacaagaatttttaatttatccatcataagtccctccggtcttctatattctcaaaaatggtaacaaacgccctgttccaagggcaaattatccttttttaattctgagtatatccgataaatgtgtctattttatggaaattaccaaaaaagccaaaactgcatcgaaaacacaatttatacggaattatagtatcaaaatagtatcaatttgtctactttccaaatatcatataaaaataaaaatgacttaaaaccattgattttactgagaaatcagtaccaaattagtaccataaaacaacaaaaaaagagccagaacccttgaaaaacaagcgttcccggctctttttatggagatgaggggaatcgaacccctgtccgaaattccagccaccgtacttctacgagcgtagtcactgtattgacattccctctgccgaacacccagtaaccggttttcggtttcagtagcttcatattacgcccttatacgcaaagctttgtataagtcgtttcctgcatggtcgatgcctgggtccgaaagtgcaggtgctcccggtcagacaagctgcaacttaggcagccagtgctaatttattattatcagcgtttatatttagatttgaaatttaacgcatttcatacggctcgcttctccggcttttaaaaccccgtcgaaaccagtacatccccgaatcacttcggcggatcatgccagttatcagaaatttattcttctgatctttgttattatatgggatttttttcggttcgtcaagagaaaagcctctgtctaaaccaacagtttattttactttttctttctgaactacagtcaaaaaatattattcattacatcaatatttaatacaggttctttactttaaactcacgttccacttcacgccgctgatctttcttcgcgatatcctgacgtttatcgtacagttttttaccacgggcaagtccgatctcgactttgatcagatctcctttgatatatactttcaatggaaccagtgtataacctttctctgcaatttttcctgccagcttattgatctcatatttatgaagcagcagttttttcggacgcagcggatcccggttgaaaatgtttcctttttcatatggactgatgtgcaatccgtatgcgatcacttctccgttctcgattcggataaaggattctttgacactgcattttcccatgcgcacagattttacttccgttccgtgcagagctactcctgcctcgtatgtctcatcaataaaataatcatgatatgcttttttattatttgcgaccaatttgtatctgtcttttcccataatttttctacctttgctaaaattcttcttccttctttggatcaaccagttcaaaatcaattctgcgcaccagtttgtctgtaccgatcacacgaatttttactgtctgtcccagcttatagctttttccggtgttttcacccaccatctcgtaggtactttcaatataattgtagtaatctccacgcagcgttgtgacatgcaccatgccttctaccgtattcggcagttccacatacagaccatagttcgtaataccggagataacgccctcgtattcatttccgatacggctctccatgtattccactttcttcattttgatggtctcacgctctgcctcatctgcccgacgctccaactggcttgcctgctgtgccacgcccggaaggattttccaataatgctccatccgcttttcattcatccgtccacgcagactgtctttaataattcgatggatctgcaaatccggataacggcggatcggggaagtaaaatgacagtaatactgcgctgccagtccgaaatgtcccacacattccacactgtattttgcctgcttcatggaacgcagtgtcaggcgggaaatcagtccctccaccggcgtatcttcgatttttgccaaaagtttctgcaactctttcggatgcacttcatcagaacccatatggatatgatatccgaaattattgataaacgtgctcagctttttaattttttctgtatccggcacttcatgcgtacggtacacaaacggaatctcctgccagaaataatcctgcgcaacggtttcatttgccgccaacataaaatcctcaatgatctttgtcgccggattgcggtcatacggtttaatgtctaccggatgtccctgatcatccagaattactttcgtctctggaaaatcaaaatcaatggaaccacgtttccgacgttttgcacgcagcagatctgccacctccttcatatccaaaaacatccgtacaaaatctttgtactcttctgttttctccggatctttcagcgtaataattttatttacatcggtataactcatgcggcggtcaacgttgatgacagattctgcgatccgatgatccacgatgtttccttttgcatcaattttcataatacagctcaaagtcagtcgatcctcgccctgatttagagaacagattccattagataacgtatgcggcaacattggaatcacacgatccaccagataaacactggtgccgcgtttcagcgcttccacgtccagcgcactgttttcctgcacataatttgtcacatcagcgatatgcacgccaagctgccagaaatcgccatctctggtcaaggtcaccgcatcgtccagatccttagcatcctctccgtcaatggtaacggtctgccagtctctaagatccatacgtcctgccatatccgcagaagtcacatcttttgccacgcgctctgcctgatttaatactttctccgggaattccaccggaagtccatacgcccgcaccagagacatgatatccgtacccggatcattctcatgaccgatgatctcgatgacttttccttctggttttttgccttttccaccgtaagaagtcagttctacaactaccttatgtccggtcacggcacctttggaacgctcgattggtacaaaaatatccatattgatccttggattatccggtcgtacaaaaccaaaggtcttgtttttatcaaatgtaccaaccacggtttttaaaccatgatccacgatttttacaacttttccttctctgcgttttccactggatggaaccagcgcaatctgtaccacatcatcctgaatggctccatttgtattgctttccgaaataaaaatatcttcgtcctcaccctcaatggtaacaaatccaaaaccacgggcatgcgcagtaaatacaccagtcaggttcgggctggtaccttttgtatattttccctttgtggacacctcaactttaccctctgccaccagtgcatccaa

SEQ ID NO: 13442 - DNA, 5195 bp, Unknown
  gut microbiota DNA sequence
ggcgctgcgctttgggcacattcataaggattgcgatctcctttgccttcatcggcacatacagatcatcgcagatcagttcatatacaatttgttttctctcttctaataattctttcttcatctattctatccccatatcacattcacagcaaaaggaacatcctttgtaaaaacgcattgtttcctatatttattatattagtataattttcaatctctgtaaaacaactctccgtataataataaaagactgtcgtaaaacgacagcctcttaggtattcttactgaaaacgtccaattgtcagtactgcagaaataataaggaacagtgccagaagaactcttgtgatctttacaagcattccttccatagaacgtcctttgttcttgctccaataagtatcagatgaaccggttaaagctcccagtccgttattcttaccttcctgcatcaatacgataactgtcatgataatacttaatataataaatacgatctgtataattgttcttgcgatttccacgatatccacctcctgcggtataaattaaatggtcataacacacctataaccacaactaagagatatgataccatgtatcactgaaaaaatcaacatctttttcgttagtctactctatcttgtccatgtcatattcgcttacctaagttctacatctctgtttcccatattcacacacccatttcaaatgtagctccagacatttctcatatctgcgcctataattttagtccccggaaccatttgtttggaatcacaaagacgcacacaatgccaagtacgatcgctgccaccgccttaaacgtctccaaaccgctcgtcattgctgccgcggcatccccgatcataatgtcataaatcgtattgtaaatgccgattcccggcacgattggaaaaattccagagatcataaacacattcgacggtacttttctccacaccgcaaacaaccgtgcacagaacacaataaccaccgttgccgcaaaacaggcaagagtattggaaaacttgagatttacaatcaaatacaccagccatccaagcattcctgtgagtccacagacaaaatactgttttttcggcacatgaaacagcacggaaaaggcaatcgtcgccaaaaatgcagccgcaagctgcccaattgcattgattagcatatgtttgtttcctcctcccactacagtttcagtcccaatcccacgccaatggcaatggaacagaatacaagaattgcatccaaaagccggacgcatcctgacagataatcaccgtccacaatatcgcgtattccgttggtaaatgccactcctggaatcatcggaatgatcgcccctgcgatcgccagttccaaatgttccgacacaccgatccgctgcaggatcacacagagaatcgtgacaagcagtccgccgataatttctagcaagacctttgaaatattgacatgcttcgcctctaagaaagagaaaaacatctgcaagatcacaccgcacacaaaagcagccagacaatcccacatgcttccgccaaacaggaaaccaaaagcagccgcaccaacaccggaggaaagcaccagttcccacaccggctcgtttttcgccgcccgaatctgttccagcgtcttcaacgccgtatccaccgatagattttcctgttcgatcctgcgggaaagttcattgatatcacacagtttcttcatattaacagaaatcgacggtacatatttcagtctagtggaagtatgctcctcctgctgatgcacattgacaaacagaccattcgtaatgacatacatttccacttcttctatctgaaaatgatccgccacacgctgaatcgtctcctcgactcgggaaatctccgccccataacagagcagcgcttctcccatgccgatgatcagtttctgcactttttttagctgctgcatgttttcctcatttctgattgcttccatactttataaaaacctttccccgtttcatttcataaaattcatatttctgattttccaatatgtaacaatgcaccatctttacagggatcgcataccattctaattacacgattcaaatagttttatctttccaacacttacacattctctatagtgaaaaatcaaattcatctgcgccaagatgctcactctgatattgcatcagataccccgtcagttttccccgatgacactccgtcgtccaactgatcatatcctcgatattatctgtggtgatcatccccgctcttccaagcgcttccagatcttttaagctttctcgcttacagatatcataaaccaaatccttcaggtgttccgaaatcaatgcctgatacgcttctttttgcgtagaattaagctgcatcggatattccagacgaaacgccgccatccggcaacggatcaaaatctgagaccattcctgtaaaagcgcatcataagccgcatagtcgtatttaagatttccatctgaatccaggcaaaacagaccgctgatttccaccttacggtacaccggattttccggaacatacagtttcacctgatctgcctcgatttccatacactccaaacggttacattcctgaaatgcatcctttggtatttttttcacagtttccggaatcgtcacttcccgcagattggcacggcgcaacgccatcggaccaacttctgtcacctcttctggaatcttccatgtctcattttttccaaaatatttgatcaatgtatcgccatgttctccccggcggtaaaacgcatacgcatcattgtaaaaatatgggttttccggctgcacggtaatatactgaatcccgttcatgctcggactccagccgtaagtatccgtcagggcatgctcacccaaggtctccagtgatgccggcaattccattccttccagattgatacagcagcgaaacgcatctgcaccgatctgtttcaatccttccggcagtgaaatccgccgcaaagcctgacagctctcaaaggcttcttcctcaatctgctgcacgccttccggcagcaccacctgctgaatgtacatctgtccttcaaatgcatgccgctttacgcaaaccgttccaggcgtagcttcataacattcccgctcatcctctgcccgcacagctaccagcgcatagccttccggatgcttttcatataagccatatccatcagaaaaatagttcggattgtccggtgccacttccaatgcaatttttccccattcccatgggcgtaccagctctgacaccgatgccggcagatacatttctgtcactgccgtgacaagcagcacgttttcgccaatcttttgtacaccgttctgtaaaatcagttttttcagactcatgcacattttaaaggcaccatccccgatctccgtcaccgtttccggtacttcgatggtctcgatcagcgctccatgtgaactgaatgcctccggtgcgatttttttcaccggaagcccctcgatttcaggtggaatcacgacatggagatcttcgccctcgtactcctcgatcacaattccatctgtttcttttctatatctgtaattgttccaatgcatctgaaatttcctgctgtctttcatacaattgatattttttgttatatttgaaatattctttgctgcccttgcgactgataaatttcatgctgtttgtattgactgtcaggtctgttaccagaatcagcatctcgttaccggttccgaagattttttccacaaaagcaaagagattttccagttctttgctgatttcatcactctgtgccttcatgtctgtcacctgatcgtcaaatgcttccttaataaacaggaatgctgcctgtgcgttgtcgatttcctgcatgcgaagctcttttgcatctttttgcagtgtacggatcacaagctggtaaccgcggcgtgctgcgccggacagcgcattggccttgtcctcctgctccatctcaagctgtacctgatctgcccgcgcctctaataagcccggaatctgagaacttgctcctgtaaatgccgcaagttctgtttttaactcttttaataccggaagcaggctacgcaatgcatcctcaaactccacattcttacgaattttatcctgtaatgcctccagcaacagaccaagcagggaaatacgttcatcaaatgctgcgtttttcgcacgcttacgcacatctgcgtccgcatttccggaaaggatctgtgccacacggtaatcttttttatacttctggtacaagtcataataagaagcaaactcgcgggcaatccgtttgttgtgcagatactgaccaacaagcacttcgtccacggtaaatccgttttcttcatataaataaatggtctctgacagatcctcccatccacgggcggtcacataggatttgccgtccacagtattttcaatgacataaaaatcatttttcttaatatccagataggtcaggattgatccatgcaagcccttattgaccgcatatttccgccatgtatcataatctgcttccacttccagcactttcagacggtccatggttacgatatcaaactcacggacggaacggttaaactgcggcgggtttcctgcggttgcaaccacccagccctgcggaatctggtgttttccaaaggttttgtactgcaaaaactgcagcatggacggagccagtgtctcagacacacagttgatctcatccagaaacagaattccctctgtttttcccgtcacttccattgcttcgtatacagatgccacgatctcactcatggtgtattcagatacgtcaaactctgttccgccatagtttttgtgactgataaacggcaggccaagcgcactctgtcttgtgtgatgcgtcatggaataggacaccagtgcgatatccatctcctgtgcgatctgctccataacggcagtttttccgatacccggcgcgccaagcagaaataccggtctctgacgttcaatcggaatgcggtaatccccgtactcatctttcatcagataaatacgaacggccttttcaatctgttcctttgcttcctgtatattcatgtatgtttatcctccatttgtaactcatgtgacatgctcccaccacttaaatcacagattttgaagtgggggcttcttgctcaatggctctactgagcc

SEQ ID NO: 13443 - DNA, 10324 bp, Unknown
  gut microbiota DNA sequence
tctgaaaagaagatgtcagcttgcgctgaccagaatcacgcaccaagtctcacgtgcgttcgacttgaatttctgttttttccataagctgcgaattatgtgtttctgtatcaaaaaagttttgggagaaatatcaaaatattcacaaatatatataaattttgatagatttcacttgttttatgtgcaaaattatcgctcaaattcgcttttaatgttgaaatatgacgattagcgcggtataattatgaaaaatgtagcaactaaaattatagtaaataggaaacagaaaaaatgccaaaatataagattaagaaaaaagagtgccaattgctggtgaatgtaaaacttacatcttcagaaaaaatcaatgagatagaaattatatatccgaatttgcttattttttgaaggggatggtatacaaattaattcaggggaggaagtatgcgatatacggtagtagcagaaacagatattggaattaggaagaacataaatcaggacagtgttcttgtaaaacatgcagagacagagttaggggaaattttacttgcggttgtttgcgatggaatgggaggactggacaaaggagagctggcaagtgctactgtgatccgaagttttgcaacatggtttgaacaggaacttccaaaagaactggtgcatcttgattttacggtcatcgcacagaagtgggaattaatgataagggaattaaatacaaaaatgggtatttacgggcagcggcagcgtgtacaacttggaaccacggtcactgctattttgtgtgtgggagacaagtatctgactttacatgtaggagataccagattgtattttctggatgaaacgaccattcgtcagatgactacagatcatacgtttattgccagagaaataaaaagaggaacgatgacattagaacaggcaaaagtggataaaaggcgaaatatgctgttgcaatgtgtgggagcttctgcgcaggtggaaccggaaatgctgtatggaaatataaaaagcggcatatttttgctctgttcggatggttttcgacatgagatcggggaagcagagatgtttcagacattacatgcaagtgttttgaaagatcaaaagacgatgaaaacgcagttacaccatttgatcgaactggtaaaacaacgacaggaaagggataatatctcagcgattttagtgaaaatcgatggaagataggggaagaagttatggcagaaataggatctgtaattgacggaaaatatgagattttaagaaaaatcggtcagggcggaatgtccgttgtttatctggcaatggacacgcacttgaataagcagtgggcagtaaaagaaattagaaaaaaaggcaacggaaaagacgacgtggtgattgtaaacagtctacttgcggaagcaaatatgatgaaaaaactggatcatccgtctctgccacgtattgtcgatattattgacaacggggagaccatttttgttgtcatggattatatcgagggagaatcgctggataagattcttctggaatacggtccacagccggaggagctggtgattgcatgggcaaagcagttatgcgatgtcttatcttatctgcattcccagaagccgccgatcatttaccgtgatatgaaaccggccaatattatgttgaagccagagggaaatattaaaatcattgactttggtattgcccgggaatataaggaacagagcctggcagataccaccgtgcttggaacaaaaggttatgcgcctccggaacagtacagtggccagactgatgcaagatccgatatttttgcgcttggaatgacgatgcatcatttgctgaccggaatcgacccgcgtggcggagaaaaatatgtaccggtccggatgtggaacccggaattgtcagaaggtattgagattatcattgacaaatgtgtacagccggcagcggagaaccgatatcagaattgttcagacctgttatatgatctggaacatccggatctgatcaccaaggactataaacggacacagaagcggaaattgcgggcatttgtcatatccggaactctggcagtcgctcttgcggcagcaggaatcacctgcagggtggcagcaaaaacgatcaacaataatgattacgaaaatctggtttccgtatcagaatcaacgtcagtagatgaaaaaatcgacagctatatgaaggcaattgatatttatccggaaaaactggatgcttatgaaaaaatgctgacggcttatgaagacgatggaacctttggaaaaaaacaaaatgatcagtttttgggaatttacaaccgaaataaggcagaatttgacacttccagtaaggagtatgcggaactgaattatcagatcggtatgatgtattttaactattatacggatgacgatggctcctatagtttttccaatcgtgtacagaaagccatttctttctttgaattaaatgcgaaaaatgagaatatttctcctgattttaaagaaaagaaaatttcggactgttattatcagatctgttctttctataaaacttatattttgaattcagcgaccgtagaggaagcatcaaaagaaaagtatgaacagctgttggatcagatcgacgatacgttgacagaggtggaagattccggagcgtatgataaattaacattttataatggtgtatttatgctactgtatgatcagagaacaaatatagaacaggtaaatgtagatcaggataagattcttactttattggatcgtgtttatgaaaaagcatcagaactgacggtacagaaggaacagtcacagcagttgcagcgggaaattcttgataattacgacaactatagagaagcaattcagagaacttatacaaatgcggaagagaggaaacagtaatggcagaattattagtaaaaatatcgtatattgcatttgccggagctgttgtttgcctgattctggcagttattttgtttataaaatttaaaattccgacggtaattggtgatttgtcaggaaaaaatgcgaagaaagcaattcagcagatgcgggagacaaactcccaaaaaggcaatccggccttaaaaccaggaaaaaagaacgaaaagcataaaaaactaacggaagaattaacatttaagaaaaaagaaaatgtgacagaggcaatccggccggaaacgggattgctaaaagaaacaatggcggcttcacaggagtcatcatcagatgagccggaactgctggtaagcgaagaaaccgctattttggggaatgtgacagagtctttggaaagtgagacggagattctgacacaacagaaaacagtgcatatgaagatgttggatgacattatgctggtgcacacaaaagaacgtatttcataagtaagatttacttattacaaatatgaaataaaaaataaacaggggaggaaaagatgagaaacagaaaatgtacaaagcccaaacgcttgttatccttttttctggcagttctggttgcagtgtctattctgccgatgtcctggcttcaggcatcagcagcaacagaaaaacacccggatgcagtaaccataaccgtaacagatggaaatggaaaagcgctggctgatgcggtagtcaattatacgattgagtcgcagacagatgttgaaaatccaatatccggaattgtaatgacggacgaagacggatgtgcagaagtactgtctggggatgactataaggaaaatgatttagaacttaccgcacaggtatccaaagaacattatgagagcaatgatacggccattgtatctttgccaatcacatctgcagatcagaattttgaggtgtccttacgttgcatgctgattgaggatgtgactgtgacaggtgtaacggaagcgtatgcggatggaaaaaaattcccggcagctaccgtggagggtatcgtaacagatggtgaacatccggataaggtaacctatgaactgtacacatatggaaaagatgagacgactgggaaagacgaatgggtatcagcgggacaaaccagtgaacttccacagatttcagaggtgggaaactacaaacttgcggtcagtgtagaccgtggggaacagtatgagatttatcgtactgaggttgattcagaaataacgttaggtaaaataacggattatacaattacacctttgaatgagacctataccggagcaaaggaaggtcaggaacttccaaaatatgatgctgtaacggtaaccggtggaagaaaaactgataatgttacttataagcttggtaccggcgagaaaaccgagacgattccacagattcaatatgccggaacttattctgtgacagtacgtgtggaaagagagaattatgaaccttttgaacagacgtatacggcagtgcttaagtcaaaggcaaatgaatacaagggtacatatgatggaaaataccatcgactgatagaatccgtggaaggaaccgatcctaataataaagatgtagtggtggaatacagtgtatccgaaaagaaagaggaatcaagctggtcaagagaggtcccaaaaggtgtaaatgcaggaagttatccggtttatatccgaatcgacagagataatgacggaaaatttgaagaaacaattgatgcaatagcaacgattgatccggtatccattgagctgaaaaatatttcagatgagataccagaaagtgtaatatacgaagaagcgcgaaatagaacctacgattattctgtaaaagcttttggtgttgatgatcaggagtttgattcatcagtcgtgaagattacttattccattgagagtgcagaaaaagaagatagctctgaagaatcaggggatacagaaggaacagaaacagggaatgcttctacagatatgaaagaaattgcaacgatcgatgaaggaggacagctgcaggttcaggaagcaggcggtggtcatagcatctatgtagttgtaaaagtagaacttaaagatacttgttcagaaaaaaacaattatattaaaaaaacacgaaaaacacagttagatattgttcagacggatggtctgctgaaatttgaagaaaatggtaacattgttagttctaaaaagtatgtgtttggaacaaataatggtattatttcaaatttgaaggcatggaaatctgagaaggacaacggtacaatcacttatagtacgactgttaatggagaagattccgaaaactatggaatttctattgacaaaacgagtggaaaacttaggatttccaattatgagaatctggcagaaaaattagtggataataacggtgcgctgactgtaaaagtgactgctcacaaaactgctggaacaaaatgggttagaaaaggctttgggctttgggcaaaaaaagtactttatgaggaagcagatgccgattattccattaatattcagtttgaagcaacgccggagaacagtttttctctgaagagctctgaaagtgtagatgcagaaacaataactgccaatgaagcaggatggtttcagcaggctgtatatgttgttccggcagagggatatcagattgcaagcgaatggaaaaatgatgcaactaagacattaaatgcaatgagctgcgtggtatttaataatcagggtgaaagcgaacgtattgtttatctgaaaaatacaacgactggtggtattacagctccaatcaaaactggtattgagaaaattgacagtgtaagaccagatgcaaaagatatcgagattacctattctgcttctacttcgcctattcttgaaatgttaaataaaattttccatttctatgataaaactggtgtcgaagtaacaatcacagcaaaggatgctacttctggtattaaagcactgaattggatctatacacgtgctgatgatgccagtgatagtaatctggaacaggccagtggaactttgactgacatcgaggaagttaaaacggatagagataaaaaagtttatcaggcaacattgccgcttccagttgggaaaaaagatcagttaaatggtaatctgcaggtacaggcagttgatgcagcagatttgtcctctgactatatgacggacacggacaatattgttgtcgttgatagtatatctccaaagttagatgcatcctacagttttgaaaacgcaacggaacattaccagaaggtagaagaagacgttaatgagaagaaagttaatcatcattatacttctgatgatgtaacggtaacactaaaagtaaaagaagcaaacttttacgcagatgatgtaacggtcaccataaaaaaaacagatgtatcggataaaacgacagactattcgttcaagggatcaaagctgaattgggaaaagattacaaataaaaatgccccagaagatgatgatggcaaagactggtaccaggcagaatatacactttccgaagaaggcgattatgttattacgttacaggataccgatcattccggaaatgtcgaagaaaaagtctatacatcagaggttattaccatcgacaagacggcaccaaccattacgtttgaggaagatgcttctgtaacagataaaacagatcctaaaagaaatcagaaagtaactgtaaatattgatgaacgtaatttccgtgcaaaagacatttcggtaaccggttctgcaaaaaatatcaaaggggaagatgatcagaagaagcttgatgctcttaatgagtatctgcagcaagaggacagctggaaaataatagataagaagcatgtcgcagaactgtctttggataaactcgaaaatgttgtcggagatgcaatttatgatctgaaatttgaatataaggatctggcaaagaattcactggccggtgaggaaaaagaacattgtacaggggtggttctggatcgtgaagcaccaacgaacgtaaaggtttcctattctgataactatacaacactaaagaaaatatttgataaagtggcggaagcagttaccggtaaaaaatatttctattataacaaaaaagtaacattgacatttactgctcaggatgaagtcagcggtgtagatcactttacctggtcttacgcaaaagaagcaaatgcaagtaatgtaaataaagatacaggcgattcagcgtatacattacagacggtagacgcagttcaggataaggaaaaaccggaacagttttcagcaacggttgttttaccgcgtggggacgcagatcagttagatcagttaagaggaaactttatttatgcggcaacagacaaatgcaagaaagagattaaaaatccaattgtagataatgaaaacgtgattgttgtggatactaaggttccaaccatgactgcagcttatacaactccaagcagaaaagagggaaatcactggtattacaacaaaaacattgatctgacctttgcagtgacagaagcaaacttctatgcagaggatgtaaaagttgaattatccagaaatgcaggtgcaacttatacagagattacaccggcatggaccgatgaatcagtagatcttcatattggaacatacacaattccggcattgaaaaaccacagcaatgatgctgactacaagattcgtgtcacctatgaagaccgtagtggaaatgccatgaaggaatatgtgtcaaacgttatgacaatcgataccaaagctccgatcatcagcgtatcctatacaaataaggatgtaaaaaatgtattagcggatgcagaaggtcataacagatcttatttcaatgcaacacagacagcaaccgtgacaatcaatgagcacaattttgttggaaaagaagtagattacacgattattgccaaagatgtgactggaaaagtattgaatgcggatgcattgtgtcagaaatccggatggacagatcggggtgatattcatacgatgacgattacttatccgggagatgcaaattatacgtttgatgtggcatatgcagatctggcaaccaatcaggcaacagattacagtgaggattatttcactgttgataaaacagttccatctggtctgactgtaacatatagtccgagtattttagacactgcattaaatggaatctcctatggtttctataatgcaaaagtaagagttacacttactgcaaatgatgatatcgcaggtgtacatgatttcaaatatgcatataccaaagcggcaggtgtcagtgctgtaaatgcagagctgatcaatcagatcatcgaggaagcaggaattacttattctgcagatggacggacagcaacttctacgtttgagattccgaaaaatgcgttaacaaatgatacacagtttaacggaactgttcagtttacagcaaaagaccgttcagaaaacgaatccggtgagctggcagataccaaacgtcttgtcgtagataatatcgcgccgacagcaaatgttgagtataacacaccggttcatcaggaaaatggtatttcctattacgatggagctgttacagcaacagtgacaatgaacgaagcaaacttctatccggaagatgtagttgtatctgttacaaaagatggtgcagcatacagcgtatctccaagttggagtgatcagggaaccgatgttcacattggaacatttacattatctgaggatggcgattacttcatcaccatgaactacagagataaatccagcaatcagatggtggaatattcttcagaacagcttacggtagatacagagattaccgcaccggtaatcacagtaaacggtgaagaagcaaatggcagagctttcaaaaatgaagtagttccggcagtatcattcaatgatatcaactttgacagttacaaaatcacactgacaagaacccgttatgatgtgaaagatgaagatgtgactgaaaaatacattggaagtgcagttgcattagacggtcagggtggaagcggaagctttgatacttttgagaaagaagcaggaacagatggtatttatactatgactgtttctatgacagacaaagcaggacattcagcagaaacaacagcaacctttactgtaaaccgatttggttctgtatatgtgtataatgatcagctgattgacctgattcaagatggtggagcgtatgttcagccgtcagcaatcaaggatgatctggtaatcactgagtataatgcagacagacttctggcagattcactggatattgaagttctgtgtgatggtaaaccgatggcagatacagattattctgtgacaccggaaattaatgatcaggcaccgatcggaagcagtggatggtatcagtatcagtatacgattgcaaaagaaaattttgcaaaagatggtgtatacaagattgccgtagcatcaaaagatgcaaccggaaacagcccagagacaacaaactatgaggacaaagagattctgttccatgtggacggaactgctcctgaaatcacaagtattgcaggactggaagataccatcattaacgcacagagtgtagatgcaacctacagtgtttatgatacaatgggtctgaaatccatcaaggttctggttgacggaaaagtagtggatgagatcactgatttctctgctgacagaaataactacgaaggcgattttgtagttaatgaaagcaaagataaacagaaagtagaacttgttgttactgatctggcaggtaatgtgacagatacagattcagaagaattcaaagaagcttgtgcgtatgaattcaatgatgtagtaacaatttctacaaatccgatggtacgtgcaatggcatggatcaaagatcatgcaaaagtgattgcaggtacagtagctgtagtagcagccattgtagcaggtattattgtacttgtgttagttcgcagacggaaagattcagaggatgattcagagtcaggcggaaataattcagaagaaaagtaatagatgatccgatttcagaacgggcaaaagaaatctgggaacatattgcacctgattacgggatcacactggaaaaatggaatcatgatttagaatgagccagtgcatgcattttggaaaaagtgtcatggataatgggtatggaatgttccgggagtttctggaatataagctgaaatgggaaggaaagaaaattgtacgggtggatcgcttttttccatccagtaaaaagtgctgtaaatgtggcagggtgaaagaagaactgaaactttcggacagagtatacatctgtgcgtgtgggaaccagatggaccgagatctgaatgcggcaatcaatatccgtgaagaagcacgtcgt

SEQ ID NO: 13444 - DNA, 363 bp, Unknown
  gut microbiota DNA sequence
ctgctcattcagcgaggccgtgcgcgagcatcccgacttggtacagaaatatctcggttcggtggtgccttatcgtgacaacttctttgcggcactgaactcggcggtgttctccgacggttcttttgtctatatcccgaagggggtacgctgtccgatggagttgtccacctatttccgcatcaatgcccgcaatacggggcagttcgaaagaaccttgattgtggcggatgatgattcgtacgtttcttatctggaagggtgtacggctccgatgcgtgacgagaaccagttgcacgcggccattgtggaaattgtggtgcacgaccgtgcagaagtgaaatacagcaccgtgcagaactg

SEQ ID NO: 13445 - DNA, 520 bp, Unknown
  gut microbiota DNA sequence
gtctataactttgtgacgaagcgtggccattgtaaaggggtggacagtaaactgtcttggacacaagtggaaacaggttcggccattacctggaagtatccgtcttgcatcctttccggcgacaattcgacagcggagttctatagtgtggcagtaaccaataaccatcagcaggcagacacgggaacaaagatgattcatctgggcaagaatacccggagcaccattgtgagcaaaggcatttctgccggaaagagcgaaaactcttaccgcggcttggtgcgcgtggcacagaaagcggacaatgctcgtaattacagccagtgcgactccttgctacttggtgacaaatgcggcgcgcatactttcccctacatggatattcacaatgaaacggccatcgtggagcatgaggccactaccagcaaaatcagtgaggaccagatattctactgcaatcagcgcggtatttctacggaagatgccgtggggctgattgtgaacggttatgccaaagagg

SEQ ID NO: 13446 - DNA, 237 bp, Unknown
  gut microbiota DNA sequence
ctctgaatctgttagaaataacgttcttctcgcaaactcaacaatcttagaagcctgtttttttataatttctgactccttgtttaaatacagataaaatctgttttcatctgcctgttccatttcttcaatatcatctattccgtacttatcgcaaaaccgtacaagtgcttttaatggttctaaaaaatatcttcgatgtctttgtaccttatccatattcagaatttcacacag

SEQ ID NO: 13447 - DNA, 740 bp, Unknown
  gut microbiota DNA sequence
cagaataagaacaaccaataccgttgagtaaaaactgatgaggaatttgggatatggaagaaaaagacagagaaatattaagagaggcggcttcagagcagggatatacaagtattgccattaataaagatggaaaacacgtgggtggatgttttattccgtggaagttgacttctagtgcgatcaatatgaaaactccgcgggtaacattggccgtggaagatttgcaggatgaagctattatggcagatgtgaaaaaatgtaaagtgcttggatgctatattatgattccgctagaagattacagttttgtgcagcagtttcatgagctttgcgatttgtttattttgtatggcaaaaatatcagtgacttatcttttgttcaggatatgccgaacttatttctgttttatctggaggatgcaaaactgacagacattcgaccgttgattgataattgcagacggagcaattcgcttccaggaaaaaggtttggtttttatcattgtgagattcaggataccagcgcgatgaaggatgcagattttatgatttctgaattactgatctggccgccggaaggtcagacggacgagaaagagcgctggttaaatggacggcatatcagtggatttaggatttatgattagcaacgatagcatgagtccttttatctcagtcgagaagactcccacttctgcaagtggtgagtaaaaacaagtctttctcagtgggagtac

SEQ ID NO: 13448 - DNA, 21270 bp, Unknown
  gut microbiota DNA sequence
aatcctggtctccgtaatttcttcatctccggctacccagacacggatcttgctgccctcagcactcagtgctccattcacttcggcatcgtatacccagtaagggaaatagataccggtcagtttttcaatctggttcttctgaaagaatgcattcggcacaaatttctttttctgtacaaaatccaagaaatgatcttctgcctgtttccggtcaatttcaaacggaatgatctgatccggatgaaattctcccgtcaattgttctgagagaagcaccggattgtgacaataataacaaaaagttgccgctgtggtctgatctgttacaatctgagcaccacagcttgggcaggtatacacaacagcagacgcaccctgatctgccgcttctgcatcatcagaagcagcctgttcaaatgcttccgtgccagctccggattctgcagtctgtgcagaatccgaagtgtcctgcgccttagtatcttcggtttcgatctcatccaaagcgaaatcggaaccgcaatattcacatttatatttctgacttttcgggtcaaaaatcaactcgccgccacaattggggcattttatactgatggttgacatatatttcctcttacgctttcggtttgccacactcagagcagaattttccggtatttactgccccgcagctacaggtccatggtgcttccggtgccggttttccacattcggtgcagaatttgccactgtttactgcaccacaactacaggtccatgtggtcggtatcggtttgccgcactcagaacagaattttccggtatttgttgccccacaactgcaagtccagccattggaagctgtgttctgctgtgctgcctgtgcctgctgacgattcatctccatctggcggatatttgcctcagatgcagcgcccatgacacctgctcctgcctgcattcccatacccatgcccataaatccggatacggaacctgctgagttggaacctgcggcttccattccacgcgctacggacccctgtacatatccctcacggatggtcggatcagaaagcatagctccctgatttcgcatattaatcagttttgtggatacatcatcataagaaatgcttgcgataccaaccgatgcgatctccacgccgcggttctgcttccagtcctcatccagaatattggacatgtacttgccaagttcccgtcctttggatgtcacaaaggaaattcttgtgccgtccgcagacatctgattgatagctgactgcagtgcctctaaaaattcatccagaaactgctcatttacatctgacacttctacctgtgccatattccgcggaattacttccgcatagaatttcagcggatcactgatgcggatggaataggttccatgtgtccgtaaaaacagctctgcattataaaagttatcaaaataattgatcggatttcttgtaccaaatttgatgcctttgatctcctgcagattcagataatatactttctgttctgtcggagactgtccgccgtatttgatacgctcaaatgtagcctccatggcactggaaaaatctccgttaaacaaagaaggttccatgtcattttttacttcaaaatatcccggctctgccgtatagtcaataatcttgccgccatcggtcaagatcataaactgattatcatacacatgaatgacagaaccatccgaaatcacatttctgctgcctttccggttctgggattttttattcatcaaaacgcccggtgtcatcaatgtctgcgcgcccatatctgccggttcgattacttctaaccactgatctgccagacctgaactgatactttttactgctgctcgaatgattcccatggtaatttctcctttttgcttttatgtatgctcagaatctccaaaacaagatcttcaaaacaaaaaatactgagcgtacaattctatgcttcctggtcgtttttggacaatgtgatccatttcagatatgcgttgataaacagatcgatatttccatccatgacactgtccacatttccggtttctgcattggtacgatgatcttttaccatcgtatacggctgcataacataggaacggatctgatttccccaaccaatctctgtcacatcaccacgaatgtctgccgctttttctgcattttcctgctgttttaacaaatacagttttgctttcagcatctgcattgctttatctttattcatatgctgagaccgctcattctggcactgcaccacgatacctgtcggtaaatgcgtaatacggatggcagaagatgtcttgttgatatgctgaccaccggctccactggaacggtaggtatcgatacgcagatcatcgtcgttgatctctacttccacatcttcttcgatatccggcataacatcacaggatacaaaggaagtctgacgttttcctgccgcattgaatggagaaatacgaaccagtctgtggacacctttttctgatttcaggtaaccataggcattttcgccatgtacctggaatgttacagatttgatacctgcttcctcaccatccagataatccagcacttccacttcaaatcctttggaagaagcccatctggtatacatacggtacaacatgcttgcccagtcacaggactcggtgccgcctgctcctgcatgcagcgtcacaattgcatcgtctctgtcatactcgccggaaagcaatgtcttcatacgaatattttcaaaacttgtttcaaattcatccagcaattcctgaatctccggaatgacttccggatcattttcttcatatcccatctcgatcataagttccatatcttccatctgggaggtcagctgacgataaatctccacatcatcttttttacttttgagctctttcataagctcctgggaacgctccggatcattccagaaatccggctcctccatcttccgctctaactcctgaatcctctgctctttgttagcgaggtcaaagtgaatcccttacttcctggagcgggtgtttgtatgcgttcaatgttgttttgaactggtctaattcaaccaccgaaatcacctctttctcttgatcaggatgtttcatcctgtctataaatcaacagaaatgaaccagaactgcgttggatccatttctgtccctctttcacatacttatatgatatttatacggtatgtccttttgctttgatcacatcaatgacctgatctacatatttctcacaaagactttctgtctctgcttccaccatgacacggatcaccggctcagttccactctcacgaacaagaatacgtccggtatcacccaatgcttctgccacttttgctactgcctgctgtacatcagcatcattctgtgcttctggtttactctttactcttacatttttgagtacctgtgggtaaatggtcaccggctcagccagtttacttaacggcagtttctttgccagcataacttccatcattttcatggatgttaagataccatcacctgtggttgcatatttgctgaaaataatgtgtccggactgctccccaccgatacgatgaccattctgaaccatgttctcatatacatatttatcgccaactgcagttttttcgtagttgatgccagcttcatcaaacgctttgtacagaccaaagtttgacataattgttgttacaaccgtattgttcagcagttttcctctctctttcatatatttaccataaatatataagatcagatctccatcaatgacatttcctttttcgtctactgcgatacaacgatctgcatctccatcgtaagcaaatccaacatccagattgttgtcttttacaaatttctgaagtacttcaatgtgtgtggaacctgcatgattattaatgtttgttccatccggctctgcgttgatgacatatgtttttgcgccaagggcatcaaatacactctttgcgatcatccatgcacttccgtttgcacagtcaagaccaacacggacatttttgtaagaataggtagccagtgagatcagatatccaacataacggtttcttcctgctgcataatctaccgtgcatccaatctcctcgcggacagcaaacggtacatcttccatttcttctccaaagagatttaattttccgtcaatgtaatcctcgatgtaggaaatggttttctcatccatcttctcgccgttgccattgatcagtttgataccgttatcataaaatggattgtggcttgcggagatcataataccacagtcaaaatcctctgttcttgttacataagatacagacggagttgtggttacatgaagcaggtatgcatctgcacctgaagcagtcagtcctgcaaccagagaatactctaacatgtaactggaacgtcttgtgtcttttccaattacgactttgcatttttttcctgtaatctgatgataataccatccgataaaacgtcctactttgtatgcatgctctactgttaaattcttgttagcttctccacggaagccgtctgttccaaaatatcttcccattctaattcctttccatttttatgtagactagttaaaaatctacctttgtgttcccgtatattacaattttgtttttcaaatgttttacagcttatcctgtaactgctgcaggatcagatctacacattcttctacactgtgctgactggtatcgattaccgcatccggatgttccggcgcttcatatgggcttgtcacaccggtaaaataatccagctcgccttttcgtgccatctggtataagcccttgatgtcccggcgttcacattcctcgatcggtgtgcttacatatacttccataaaagcatctccgataatctcacgggcattctgacgatcctgtgcaaatggagaaatgaaggatgttaaaacgatcaatcccgcatcattcatcaacttggaaacttcagcaattcttcgaatattttcaatacggtctgcttcacggaaaccaaggtttttatttaagcccatacggacattgtcgccatccagcagcattgtatgtttgcccattgccaccagacgtttctccagctcatttgccagtgtggatttgccggaaccggacagaccggtgaaccagattgtctttgcactctgtcctaactgtttttcacggaaatcccgggtaatgtccatattatgccaggtaagctgatgctcacggttcaatgtctgctccactacaccacatgctgaagtcatgtggctgacacgatcgatcaaaatcagggaacctaaagcattattcttctcaaatttatcgaaaaccagtttggaagcagttgaaatctcacagcgggcaatctcgtttttataaattgcatccgcataaacttcctccccggaattgacatcaattttatatctgatattcatgatggttgccggaacactctgcgttccaagctttaacagaaaattctttccttccaccagttttgtatcgtccatccaaagcagcgttgcagaaaacatggaatttacattcaacgtcgtattctccactaaaacgcatcctctggaaatatcaatctctgtatctaactgaatcgtcaccgcatgaccgacagaacttgtctgtacttctttatcaccttcgtaaatcagttttactgacgcagtctctccacttggcaatacctgaatcgtatcacccacagacacgctgccgctctcgatctgtccctgaaaaccgcgaaacgtatgatccggtctgcagacacgctgtaccggcatcgtgaatccggtttctgtcgggttctctttgacatcgatggtctccagataatccagtaaggtcttgcctttataccatggcatatggttcgaccatttggtgatattatccccttcggttgctgataccgggatcatctgtgcggtactgtagtcaaattctgccagtagcactttaatgtctttttgaatctttttgaatttatcctgctgataatcaatcagatccattttgttaatagcaaacacaaaatgcttgattcccatcagggaacagatccgtgtatgccgtcttgtctgtgtcagaactccctgacttgcatctaccagaatgactgccagatctgcaaaagaagctccaactgccatatttcttgtatattcttcatgaccaggtgtatctgccacgataaaggagcggcgttctgtcgtaaaataacgatatgccacatcaatggtaattccctgttcacgctctgccatcagaccatctaaaagaaggctgtaatcaattgccccgcctctggatccaactttggaatccagttccagtgcgcgctcctgatccgcaaacaataattttgcatcatagagcatatgtccgattaaggtggattttccatcatccacacttccacatgtaataaatttcaataatgcgttcatctagaagtagccctcccttttccgtttctccatgctggctgcaccgccatctttgtcaatcacacggctggtacgttccgaagataccgcacttaaggtttcctgaatgatcgcatccagtgtatccgcatcggactccacaccgccggaaagcggataacatccaagggtacggaaacggacttttttcatcatcggtttttctcccggaagcagccgcatacggtcatcatctaccatgatcagattaccgtcacgctctacgacagggcgctctgctgcaaaatacagcggcacgatatcaatgttttccctcttgatatactgccagatatccttttctgtccagttggaaatcggaaatacgcgaatactttcgcctttattgatctccgtattgaacagcttccacatctccgggcgctggttcttcggatcccatgcatgttctgcattacggaaagagaaaatacgctccttggcacggctcttttcctcatcacgtctgccgccgccaaaagctgcggtaaaaccatatttattcaaagcctgttttaatgcctgtgtcttcataatatccgtgtaggctgctccatggtcaaagggattaattccctgacgaacaccttcctcattgatatattccaacatctcaatgccgtatttctctgcaactttatcacgaaacgcaatcatttctttgaatttccatgtagtatttacatgtaagaatggaaatggcggtttctccggataaaatgctttcaatgcaaggtgcagcataacggaagaatcttttccgatggaataaagcatcaccggcttctcacactgtgctgccacttcccgcataatatatatcgcttctgcttccagttcatccaagtgatccatattttttgtcctcttttcctgttattctcccagacctgactggatcagagccacaactccttccagtgcttccttttcatcctcgccttcacagacaatttccacctcatcattgtacttgacacttgctgcaagtacacttaacaggctttttgcatttgtcgttgcatttcccttctggaatgaaatctttgcccggtacttaattgcctcatcgcataactttcctgccggacgcagatgcagtcccgcaggatttttaatttttactttctgacaaaccatgttgtatcccctccaaaatacatctttggtatttctattacttgtgaaacagcttctcgtttaattctgactctcagaggaatctgtttcatcggaattttctcccccggttcctgaagaaccgtttgttgtctgtccgtttttgtctgtaacggtaacagatgtcgtcactgtgtcggcggtcttatatgaaccatccaatgtgacagttgcggtcaaagttcccgccgtaaaattggaagcatctatcgagccagtaatatcattcggattgatctcagctagtacctcatcaaatcctttcagattgaccgtcacggtatccgcattaaatgccagtgacaaattgtctggcagattctttacggtgatatttccaaccggaactgcaaatgcccgggaattttccccttcgatcactaacgtcacactgatctgcttagactgatccgacgcaagtgttattccatccggaagatatttactcagttcaatatttgctgtcacatcggcagttgcatcggaaacattcatctgcgatccgctaatctccagttcactgatactgcttaacagatcactgtcaccagtcagttttacggtagattcactgcattttgcctccacgaaacgataaccgtctgccggtgttccattcgtagtaaatttcagtggaaccgattttcccatggaaatctcgacatccacatcaactgatgtccgattcaggctcagccggtcctgagatatctcatttccatctgcatccagcaaaacgattggactgctggttgccacattttcttctgcattactgatatcaaccactgcctgagccgtcttaatctgagacactacagactccggtcccgtaaccgtgatcttacccggtgcagaagaagtcgattccacataacaatacgcagctggtgttcccttcgttacaactttcacagagaaacgttccgtttgcagattttcaacacttacctttaacgtagcatcccgcttgttaatttcaatctggcttgcataacgggaagcactgacactgaccggtatcgttgtcatatcatcattaatattttccagatttgccacagcggtaaaatctgattcagacaattcctcgatgatcgaacgctttccggtaaccgtgaacgagatcttgtcagtattgtttaaaatctcataggtcttacccatatctgacagatattcattattttcgatggtaaccggtatcgtaaatccttttgtcttttccggatcttcaatatttaccactaccatccacaaaataattgcaaatactgctgccagtattttgaggccaaaattatttgttatccgctttgtcagttttcgtaacatgttttagcctccttttcagtttttccaaatacggttctgtggtctgggacaatttcgccgcaaatcgcagtttacttttcaggaaatcagcatcaatattacgatacaaagttccttctaccgccagagataccgcaccggtttcctccgacacaataatcgtcatggaatcgctcacttcgctgacacctaccgccgcacgatgtctggttcccagttccttactcagctccatattatctgacagcggcagataacaggtggctgccacaatacggtctccgcgcacaatgatagcaccgtcatgtaacggcgtattatgttcaaaaatattgatcagaagctggctggaaaccagagaatccaatggtattccggttctgatatattcattcagcatgacatcacgttcaattacgatcagcgcaccggtctttacttttcccatctcatagcaggcttttacaatctctgtaatcgtcttttcggaaaagcgaacagtgcttgctttctgaaaatcaaagctaaaaaatgccgtcaggaaattcttacgtcccagtcgctccagcgcattccgcagctccggctgaaatatgataacaagcgcgatggctgctatatttactacttttcccgacaaccataggatcgtgttcatctggaacaaagctgcgatcaaaagaaaaatcaaaataacaataattcctttaaaaagcatccatgcacgcgtatttttaacccataccatgatatggtacagcacaaacgcaataatgatgatctctatcacgtctgtaacgccgatctttggtttgtctatccaggaaaggtatttatccataaaggcatacaatgctgatcctatctcccgcatttgttcacttcctctcaaacagtcgtttcttatttatcgtcatgaagttcattcataatctgtgtctccaaatcatccttttccgaatcatccggatgtcccacatgtactgaattcaccttttttcctcgtgtaatcttgcggttctttgcccgttttgcattaatctttttcacctgcttatcttctaccggtacaaatgccttcggaaccgctttgacatagtaataatattcatcgtcttcaaactgtgtatgttccacacggctgtaatccacgctcagtgtcataaaatccaataccagaacgatcagtagagaaatgatacatcctgcaatcaccttaacaatccgtccgctctcaccgatatagatctcaccgctgcaaatgattcccatctccacggcaataccaatcactgctgcaatggtacgtccatgatccacggtcagttttcggatacaggagacaacgatggctgctgctgcaaatccaccaaggaaaatgtacatttccttatctgtaaaaatctctgtcactgccagtgtcacaacacttttcttagtaattccatctttcgctgaaaataacgctgcattttcattgatattcttcaataaaaagaataccatctctccacatactacagaaacaacagcgtacacccggctcagcagtcccgatgccaccggaacaacgtatgggattcctgccacgccaagcaccggcgtcaacaccgcatacattcctttttttctggaaaaacggaaatagatgcagaaaagaatcacaaaaatcaatgccacgatcccgcacaattccaatgataatgcgtaacagttcagcaggatcagaactgctcctaaaaacagcatcattccggaaggcaaaaaggaacacagtaatgcaaataacagtggaatcggatattccttcagcaaatccatatagcctattttctgattgatcagtgtaaatgctgcaaatgccactaaaaatcggaacacagcgattgtgtagatctcatatttaccgataaaccgataaatatgttcttttatttttaataattgaaccatgcatacctcctgtttttccggcgtttctgcctgtgcagtcccgcagaaactctatgcgtcctcccgcgccttctcctccgcaagataagacttatttaaccgatgcagataccgcagatactgatcccgccgttctctgcactttttatgctgataaattgccaccaacgcacacagcaccagataccctgccataaaaatgatataaaaaattgctgcctgtttcagtagctgcatataatctacatttgcaaaatattggtttaaatcatcccatttggaacacagccaaagcatcacgatcgcagcaaaacaaaccgtaccggctacaaatccttttaccagctgtaaaatgacaaagtctgcccgtcgataggtgctgatcttgagttctttttctcccgcaccggactccagtattgccatcttattcatttcccgtactctgtcctgattaatcataataacccacctatttttgctcatactacagaaaaagtatatcacaaattaccatgcaagaaaagttttttatcctccgattgcaatcgatgccgcatacactgtgcattttgtgctttgtctcaggcacagtgccgctgcatccagtgtactccctgtcgtatagatatcatcgatcagcaatacacattctccctccggcagttctgcgcctttccgaatctggaatgcgccgctcaaattccggcggcgttctctgtcattcaatgctttctgtggcacggtatttcgcacacgaaaaagcgttttttcatctacaggaagatgtaattcccgccccatagatttcgcaattactgccgcttgattgtacccgcgttttcgctgccgttttctgtgcagcggcaccggtatgatccttgtaatcttgcacctgcgaatccatggtcccagtcgaactgccatttccctgccgtaaatttctgcataatcccgacggtttgcatatttcatccgatacaatgacaattttaccggtccccgataggacagcagcgcacgattttgccggaatacatgccgctttctgctgcaatccgggcaatattcccgctgtgtatcctccagcggtttcccacatttcatacaaaaatcttctgtgatcacaaaaagtttttttctgcagtctgcacaaatgccatccgcataaatccggtcgcacaccgggcagtgcggcggatacagataatctaaccatttcccccaattcaaattataattcctccaacttataactcctccaaccggtctcttaaaccgctgtaacgcttctgttcatttacatttgcttccatattgtaaaatgccttctcatcgcctaccaaagtcacacatttgcgtgctctggttaccgcagtatacaaaagattccggttcattagcatccgcggaccggtcagtagtggaataatgactgccggatattcgcttccctgagacttatgtatcgtaattgcatacgccagttccagctgatccagttccttaaatggatactccaccattcgtccttcctcatattctacggtcaaggtctcagaaaaagtattgatttcacggacaagccccatatctccgttaaatactccaagacctttttcaatcggtatgttgtagcggcttcgcacttcccattctgcctgatagttatttttgatctgcatgactttatccccgacacggaaaatcgtctgtccatgctcatgctccgctttcttcgcatccggtggattcagatactgctgtaggatcgtattcagacgttccacaccaagtaatccttttcgcataggtgtcagcacctgaatatcaaacggttccgcattgacatattttggcagtttctgctggatcagctgaatacagatactgatgatcacattcgcatcataccgtttcaggaaaaagaaatcccggctcttattatctaaaacaaccggctcaccacggttaatcttatgtgcattgacaataatgtcactttccgatgcctgacgaaaaatccgattcagacgcactacattgcaggcatgggaatcgataatatcctttaacacgcatcccggtccgacactcggaagctggttcacatcaccaaccaaaataactctcgttcccgcaacaacggcttttaacagattgtggatcagtgtaatatccaccatagacatctcatcaatgatcagaacatctgtctccaatggattctgttcattccgttcaaaaccagcatgctcatccataccaccggaaagttccagcagacggtgaatcgtctttgcttcataacctgtggtttcactcatacgctttgctgcacgtcccgtcggcgctgccagtgaaatatccatcccttcagattcaaaaaactgaatgatcgtattaatcgttgtggtttttccggtaccaggtccacctgtaataaccagcagaccactgcgcactgcctctaccaccgcaatatgctgcatttcatctaatttcaggtcagacaattcctcaattttacggattctctgctctactgctgtttctgaaaaatcatatttcacattcaattcccgcagcataactgccacatttaattccatataataaaaagtagatgcatagatttgtacctgatcttcggtctgtttcatcaccagtttccggtcaattgtcatatccatataatgtttttccactgcatcggcatctacttccagcaattcacatgcccgccgcgtcagcaattcctttggcagatacgtatgcccctccaaagatgcctgctgcaacacatataaaataccgcttcggatacgaaaatctgaatccatatgaattcctactttatgtgcgatctcatccgcaattttgaaacctacaccggttacatcttctgccagtttgtatggattttcctgtatgatgcggtacatatcaagctgataggtctgataaattttgactgccagagtcagtgaaatgccataattctgtaaaaagatcattgcctgccgcagttctcttttttcctctgtctgctctgcaatctcctgtgctttccgctcactgattcccttaatctctgccagacgctccggttcttcttctataatacgaaaggtatcttccttgaaccttcgcacaatccgcgctgccagagccgcgccgactcctttgattgccccggagccaagataccgttcaatcgacacaatatcctgtggtgctttgatggcataggattccacctgaaactgcggtccataagaagggtgtacggtatattcgcctttcagttccacactttccccctcactgataaattggaacacaccgacacaggtcacttcatcttcctctaccgcaaggttcagaactgtatatccattttcttcatttcgaaacacaatgtgttccacaaatccggtaattgtctccataactctccttttttacaggcaaagatactcgcaatccgtccacactgcttgcttatttttacgcaataaaagcaggggacttcctcaattttggtcaagcggatattcgcaatccgcttcgctacttgctcataaccgaataactgctccgcagtttatcagaaggagcttgcactcctcctgatacaagcaagtccccacccactgcttattgcttttcgcaattgaagcaggggacttacttgattcggttaaaaagagacagtctgcatctgctgactgtctccctctctatctcttacttactgctcgtctctcttacctgaaagaaattctacatactttccggttccgattgccacacaggtcatcggatcttccgctgtcattgtattaatgccagtatgtgactcaatcaattcctccagaccgcgaagtaatgctccaccaccggtcaggacgattccacgatctgcaacatcggctgccagctcaggcggtgtcttctccaaaacactgtgcactgcatcaacgatctgcatcgttgcctcgcgtaatgcttcctctgtctcctcagaagaaacagttacggtctttggtaaacctgtgacaagatttcgtcctcttacgtccagagtcatcggctccggaagcggataacatgtaccgattttaattttgatatcttctgcggtacgttcaccgatcagaaggttatgtttctttctcatataacgaaccagcgcttcatcaaaatcgtctccggcaattttgatagaagtacttactacggttccgccaagtgaaataactgcaatatctgcagtaccaccaccgatatctacgatcatgtttccacatggtctggaaatatcgattccggctccgattgcagctgcgatcggctcctcaataatttttacatctcttgctcctgcctgaaatgtcgcatcttctactgcttttttctcaacttctgtgacaccactcggtacgcagacgctgatcagtggtttacgaaagctctttttgccaactgctttctgaatgaaatatttcatcattttctctgttactgtataatcagaaataacaccctgacgcaacggtctgactgctacgatatttcccggtgttctaccaagcatcagtcttgcttcctcaccaattgctttaattttatttgtatcgcggtcaaatgcaacaacggatggctcttttaaaacaacgcctttgcctttgacataaacaagaatacttgctgtacctaaatcaattccaatatctgttgaaatcatctttttgtctcctttcccttttcatcctcgtatttcatctgtctctataataaagttctatttctaatttaaccaaactaaatcgtctttcgaaatatgaaccggcatacgtgtttttattatatacaaataattgcatttttcaaagccttttttttcttttcagagaaatccacgatgaattaaccaattcttaatagttttttaggaaaagtaattctttttttctaaaatgttcgcaatttaatcacagaatggacacattctctttttatactaacactcgtaatcgattataaaaggcttttgctttttataataaatttttcataactcaagcttcccggattccccaagtccgggaagtactccccgaaagttcaggcaccgcaaaacgcggtgcctttttatgcatactcgcatgcgaagaaattattgcttcgcaatcatactcggcgcaaacaagaaaactgtgctgtttaaagtcttcattacgaaaatatatggcagcacagtttcttgattttatttattcgtttattatttcagatatttcttcacgtattttccggtataggaaatcgaattttctgccacctgctccggtgtcccctccgcaatgacagttccaccgccatcaccaccttccggtcccatatcaatgatataatccgctgtcttgatcacatccagattatgttcaataacaaccaccgtattgccgccgtctgtcagacgatgcaggatctcgatcaatttgtgtacatctgcaaaatgcaatcccgtcgtcggctcatccagaatgtagatggtctttccggtgctacgcttgctcagctctgttgccagtttgattcgctgtgcctcgcctccagataacgttgtggatggctgtcccagacgcacataggaaagtcctacatcatataacgtctgaatcttacgctgaatggaagggacattctcaaaaaatgtcaatgcctcctccactgtcatatccagcacatcataaatgctttttcctttatatttaatttccagagtttcacggttatagcgtttcccctggcacacttcacacggaacatacacatccggtaaaaagtgcatttcaatctttaaaattccgtctccggagcatgcctcgcatcgtccgcccttgacgttaaagctgaatctgccctttttgtatcctcttgccttagcatccggtgttgccgcaaacagatcacggatctggtcaaacacaccggtataagttgccggattggaacgcggagttcttccgatcggagactgatcgatgcagatgactttatcaagctgctctaatccatcaatgcctttgtgttttcccggaatgcatcttgcacgatttaagcttcttgccagatgtttgtatagaatctcattaaccagagaacttttaccggaaccggacacacctgtcacgcaggtcataacgcccagcggtacttttacatcgatatttttcaggttgttttcctgcgctccgcgtactgtgataaatcctgtcggctgcttacgttccttcggcaccgggatcaccagtctgccgcttaagtacgctcccgtcagagacttttcacatgccataatatcgtcaaccgtaccggctgccactacttctccgccatgctctccggctcccggcccgatatccacgatatagtccgccgcacgcatggtatcttcgtcatgttctactacaattaatgtatttccaaaatctttcaaattcttcaacgctgccagcagtttatcgttatcacgctgatgcagaccgatactcggctcatccagaatataagccacaccaaccagaccggaaccgatttgggttgccagacggatacgctgtgcctcaccgccggacaaagtacccgttgctctcgacaaggtcagatattccagtcctacttctttcagaaatccaacacgggcacggatttcctttaaaatctggtcaccgatcagatgctgctgctcggtcaattgtaaatcttccaaaaatgcgcacaggtcttttacggacatggaagtaatctcatggatatttttatctgcaacggtaactgccagagattcttttttcagacgctgtccatggcaggctttacacggtgtgatccgcataaatgtctcatattcctgcttggtcagatccgatccggtctcacggtagcggcgttccacgttgcggatcagtccctcaaatgccacatcataaacaccgacgccgcgctgtcctcgataatgtaccactaatttttttccatccgttccatgtaagatcacattacgcacagattccggcaattcctcgtatggtgtattcaggtcaaaatcatattcttctgacaatgctttcaaaatcgcataagtgtagctggacggatcattggaagactgccatcccatcacttgaatcgcaccttctgccaatgataaatgtttatccggaatcatcagatcctcgtcaaattccatcttgtagccaagtccgaaacactccgggcaggcgccaaagggattgttaaaggaaaaacttctcggttctatctcatcaatactgatgccgcagtccgggcaggaaaaactctgggaaaactggatctgctctccaccgatcacatccacggtcatcagtccgtccgccagttccagtacattttcaatggaatccaccagacgtttttcaatgccttcctttactaccagacggtctactacaatctcgatattgtgctttttatttttatccagactgatctcctctgtcagttcatacacactcccgtcaatctgtacacgtacataaccactgcgtttgatgctgtctaacagtttctgatgcgtaccctttctgccacgaactaccggcgccagaagctggattttcgtccgttccggaagctgcatgatctgatctgccatctgatcaacggtctgttttttaatttcttttccgcattttgggcaatgcggaataccgattcttgcatacagtaatcggaagtaatcatatatttccgtcacggttccaacagtagaacgcggatttcggtttgttgatttctgatcgatggaaattgccggagacagtccttcgattttctccacattcggtttttccatctgtccaaggaactgacgggcataggaggacagggattccatatagcgacgctgtccctctgcataaatcgtgtcaaatgccagagaggatttaccggaaccggacagaccggtcaatacgataaacttatctcttggcagcgtgacatcaatattttttaggttatgctcattggctcctttgatcttaatgtattgttgtgccatagttgttgttctcttttctttcgctttctagtattcacgttttttatttctttatgctacatgtatcataactatttttcatagattactcataattcgtttcataaaatgtaattctgcaaaaatactatttgtattttaggaatcttaagcattctgaagcattttcttcagatccaccatctgatcacgcagctgcgcggcagcttcaaaattcagttctgctgctgcctttttcatcttcttctccacatctttgatcagtttttccagttccttcttactcatggattctggatctttcttaaaccgtacctcttcctgagcaacctttttagaaatactgatcagatcacgcacagatttctgaatcgtcttcggtgtaattccatgttcttcattatatgccatctggatcgcacgacgacgctccgtttcatccagagccaaacgcatggaatccgtgatcgtatccgcatacatgataacgtgtccttcgctgtttcgcgctgcacgtccaatcgtctgaatcagagatgtctcagaacgcaggaatccttccttgtccgcatccaaaattgctaccagcgtaatctccggaatatccagtccttctcgcagaaggttgattcccaccagtacatcaaacacatccagacgcagatcacggataatctccgcacgctccaaagtatcaatatcagaatgcagatatttgacacggataccgatttctcgcatataatccgtcagatcctctgccattttcttcgtcaatgtcgtgatcagaactttatgacctgccgaagtttccttatttacctcaccaatcagatcatcaatctgtccctctaccggccgaacctctacatacggatccagcagaccggtcggacggataatctgctccgcacgcagcaattcatgctctttctcatatacattcggcgttgcggaaacaaacagcatctgatcaatcttgctctcaaactcttcaaagttcaacggacggttatcctttgccgatggcagacggaaaccataatcaaccagcgtcgattttctcgactggtcacccgcatacatgccgcgcacctgtggaatcgtaatatgtgactcatccacaatgatcagaaattcatccgggaaatagtcgatcagcgtataaggtggaactcccggcttcagtcctgccaaatgtctcgaataattctcaataccgctgcaaaatcccgtttcacgtaacatttcaatatcaaaattcgtacgttctgcgatacgctgtgcttcgatcagcttatcttcccctttaaaataacgcacacgctcttccatctctttttcaatctcgaccgttgcctgattgattttttcctgtggaacaacgtaatgagaagccgggaaaatcgcgcagtgctccagtcgactcttgatctctccggtcagcacatcgatttccgtgattcggtcaatctcatctccgaaaaactctacccgaactgccgtatccgtattgtttgccggaaaaatctccagaacatcgccgcgcacacgaaacgtaccacgatgaaaatccatatcatttctcatatactgaatgtcaatgagctgacggatcacatcatcccggtcacgctccatgcccggtcgcagggaaaccatcatgttctgatagtccaccggacttcccagaccataaatacaggaaacactagatacgatgatgacgtcgctgcgctccgtcagtgcggctgtagcagacaaacgcagcttgtcaatttcttcgttaattgctgaatcttttgcaatatatgtgtctgtagacggaacataggcttccggttggtaataatcatagtaggagacgaaatactcaacggcattgttcggaaaaaattctttcatttccccgtaaagctgtgccgccaatgtcttattatgtgcaatgatcaacgtcggtttgttcaactgctgaatgacgttcgccatggtaaatgtctttccagagccggtgacaccaagcagggtttcaaactgatttccttccttgaaacctttcaccagttccgcgattgcctgcggctgatcgccggttggtttgtattgtgagactaattcaaaatgatccatgcagacctcctgagtaaatctgatttatatcgtaaatag

SEQ ID NO: 13449 - DNA, 210 bp, Unknown
  gut microbiota DNA sequence
ttttctataataatccgaatgtgaaacaggtcatgatggaattgaaggaaaaacaacagggaatgatattgcaaaatcctaaaagcgctgctattgcaaaagcacaggaagcacggattaagagtttagaacagaaactatccgatagtgttccgaaaaacgaatatgaaagtcttcagaaaaaatatgaagaattacaggtgaaatata

SEQ ID NO: 13450 - DNA, 1207 bp, Unknown
  gut microbiota DNA sequence
tgctgtgtcagtcagcatataaaatggcaggaaataacaggaaacatggcagcatggaggaagaagcatgacactggaagaaacgatacaccgaatcagaccggtggatcagaaggcaaaagaagatgcaaaggagcactgggacggtctgggaaaaccattgggaagtcttggacggttggaggatgtgatcattcagattgcgggaatccagcgcacgccgcagattcatattgaaaataaagcactggtgatcatgtgtgcggacaatggcgtggtggaagaaggtgttacacagtgcggacaggaagtgactgcttccgtggcagagaattttctggatgaaaaatcctgtgtggcaatcatgtgcaaacgcgcgggagcaggcatttttccggtggatatcggaatggcagtagatacgcccagggtggaaaaacgaaaaatcgcttacggaacaaaaaatatgacgaaagagccggcgatgaccagagcgcaggcagttgcagcaattgaagcgggcattgccaaggcgcaggaattaaagaatctgggatatgagctgcttgcaaccggtgagatgggaatcggaaatacgactaccagcagtgcaatgacagcagtttttcttggcatggagccggaaatggtgaccgggcgtggtgcgggattatccggagatggtctgaaacgcaaagtgcaggcaattcggcgggcaattttcctgcatgagccggatgcgtcagatccactggatgtactttcaaaagtgggtggatttgacattgcgggaatgtgcgggttgttccttggcggtgcagcgctgcagatgccggtgatcatggatggatttatttcacaggtggcagcgctgacggcggtacgtctggtgccggaatgtgcagactatattctggcgtcccacgtttcacaggagccgggggcagatattttgctgcatgcgttgcaaaaagaagcgtttttgacatgtgaaatgcgtctgggcgagggcagcggtgcggtggcaatttttccgctgctggattttgcgtcagatatttatcacaaaatgagcacgtttgcacagatagaggttgaagcatatcaaccattggattaaaataaataagttatggtgaaataataatatatgagagagtatttataaattcagcttatataaactgtaaatagataaaaaagaaat

SEQ ID NO: 13451 - DNA, 377 bp, Unknown
  gut microbiota DNA sequence
ctcgaaaaagatgctgcggaatacaccggcgatgtataaaaaagaatatccgtttttgaaagaagtggatgctctggcacttgcaaatgtgcagctgcatttggaaaaagcatataaaaattttttcagggatccgaaaagtggtttcccaaaattcaagtcaaaacacaggagcagaaaaagttatacaacgaacctggtaaatggaaatgttcaggtagaagatcaccggataaaactgccgaaactcaagtggatccgtatgaaaaagcaccgggatataccggaaaaataccgtttgaaatccgtaacggtcagcatggaaccttccggaaagtattatgcaagtcttttatatgaaatatctgactgtgaga

SEQ ID NO: 13452 - DNA, 449 bp, Unknown
  gut microbiota DNA sequence
ccgtaacggtcagcatggaaccttccggaaagtattatgcaagtcttttatatgaaatatctgactgtgagaatcaaacaggaggagtggattatgaagatgcaaaaatactggggatcgactatgcgatgcgtggaatggctgtgttttcagaaaatataaaaaaagaagatgctggttatttcagaaaaagcgaggagcggcttgcaagggaacagcggaagttatcccattgtgagaaaggaagccggaattatttccggcagaaaaaacgggttgcattatgccatgaaaagatccgaaaccagaggcgggatttcctgcataaactgagccgcagaatcgcagacgaatatgatgtcgttgcagtagaagatatagacatgaaagcaatgagccagtgcatgcattttggaaaaagtgtcatggataatgggtatggaatgttc

SEQ ID NO: 13453 - DNA, 537 bp, Unknown
  gut microbiota DNA sequence
gaagagtgcaaaggcagaagggaggctgactgcgacaccgacgggtggagcaggtacgaaagtaggacttagtgatccggtggcataaagtgggattgccatcgctcaacggataaaagctaccctggggataacaggcttatcactcccaagagttcacatcgacggagtggtttggcacctcgatgtcggctcatcgcatcctggggctgtagcaggtcccaagggttgggctgttcgcccattaaagcggtacgcgagctgggttcagaacgtcgtgagacagttcggtccctatccggcgcgggcgtaggatatctgaggggagctggccttagtacgagaggaccgggctggacggaccactggtgtaccggctgtcatgccaatggcatcgccgggtagccaagtccggaaggaataaacgctgaaggcatctaagcgtgaagtcccccccaagatgagatatcccatccttttaaaggagtaaaaacccttgaagagtacgaggtagatagggcagaggtggaagtgtgg

SEQ ID NO: 13454 - DNA, 169 bp, Unknown
  gut microbiota DNA sequence
tcatattcgtttttcggaacactatcggataatttctgttctaaactcttaatccgtgcttcctgtgcttttgcaatagcatcgcttttaggatttcgcaatatcattccctgttgtttttccttcaattccatcatgacctgtttcacattcggattattatagaaaa

SEQ ID NO: 13455 - DNA, 476 bp, Unknown
  gut microbiota DNA sequence
aagtgagaatatgacaaaacagtacattgatttcatgccggaacgtattgtatcggctgaagataaatatttttcaagaaatcagtcatttaaattgaaaggagtagaagatgatgaaaggtaatattaatttgatttcttatgactgttatcaacaagctacagaaaaacagttggctgggctgaaatggaaggaaaacagggtgtactacatatcagagattcgtaatgaaaagatacaggatgagatttatgggtatatcgatgatagatgtagacgtttatcattatcaacagccgtaaatgatatttacagatttgatctgttgaaagaatttctgaatgagaagtgtacaagctgtagcagcattactgataaaaaatgggaagaactggagagaagctataaagcatttttatataaaaaaggattggcgctgtacgttagaagaaatagaccggataggcggaatgtt

SEQ ID NO: 13456 - DNA, 145 bp, Unknown
  gut microbiota DNA sequence
ggatatcatgatcgtatctgtggatggattgaccggattcggggatgcgattcatgcagtattcccacaggcagagatccaaaggtgtattgtgcatcagattcgttattctacaaaatttatctcttacaaagatttaaaacca

SEQ ID NO: 13457 - DNA, 254 bp, Unknown
  gut microbiota DNA sequence
tatattaatttacgtatctcagatggatatttaaaatatgtggataattgtgtccagttatttctccaggatccaatggaagcagggtattttttgccccatttttcttccagatcttccaaggctgtgagtgcaagatcttctgtatcagctttgtaaaccagctttaaatccgccataaatggttttaaatctttgtaagagataaattttgtagaataacgaatctgatgcacaatacacctttggatctc

SEQ ID NO: 13458 - DNA, 194 bp, Unknown
  gut microbiota DNA sequence
cttcatattcccgtatcttatcgctcagcatctggttatacagaaaacggcagcagccaaaggtctttgcaagcaggtttttctgctctctggttggatatatccgaaaacgatatgccatgttcatcgctttttctccccctgtgtttcaatatagctgcgaataacctcaatcggtgcaccgcccgcagtca

SEQ ID NO: 13459 - DNA, 145 bp, Unknown
  gut microbiota DNA sequence
atattttcagttgcttttttatattcctttgcaacatattggctgccacgatccgaatggataattaatggttgatcaatatttcggcgagctttggctttgtttatagtatcaatcacgcaggatacttccagtgtttctgaaa

SEQ ID NO: 13460 - DNA, 157 bp, Unknown
  gut microbiota DNA sequence
tggcctagtggctcagttggttagagcgccgccctgtcacggcggaggtcacgggttcgagtcccgtctgggtcgttttatatgggatcttagctcagctgggagagcatctgccttacaagcagagggtcacaggttcgagccctgtaggtcccat

SEQ ID NO: 13461 - DNA, 1044 bp, Unknown
  gut microbiota DNA sequence
ggaatccattataccgaagatattgattttgaaagaaggacggtttgggtaaggtatcgtgaatctaataccaacttggcaagagcaaaaaatgcagaatatagaatggctttgttaagtaatacaacttttgagttcttggttaagtacatttctgataatcgaaaaagtctgatgaactcggagtatctatttacaaaattaactggaaaaaacaaaggagagccattagatgcggattctgtgtatagcatgttgaaaaggctatccaaaaaaacggatatcaattcccatccgcatcagctccgacactattttgcggaggaaagaagaaaagaaggatgggatttgaatgacattcgttttgccctggggcataagaaagttgaaactaccattaaatacttgggtgaaaataatgaacgattgatagaagcgacagatcaatactactcaaataatgaagatttataccaaattgcagattttctgtaaaaggaaggagggattaccttggcagtattaaaaattgttccgaagttatatcaggaaaaaatatctgaaaaattaaaggaagaaatatctttagttacgactggagaagcaaaatactataaccggttatacaaattttttcagtatacagatatacagtgtactgcagatattaactatgaaacgagaaaaatgtatatggattctcttgaaaaagaggatatttcagaaaaatataaagcggaattactgagcttatttgatcgtttaaaaatagaaaatatgccagatgtctattcacaaggaaagcccttctctgtagaacaggagttttttaagcaagacaaattgtttttgctgtatgtccccaataagaagaaagcacaatctttccgtcaggtggttgataagaatgatttgttatgggacttaacgaggatacattcatcacagttggtgcgacagacaaaaatattgctgtgtgaaattctgaatatggataaggtacaaagacatcgaagatattttttagaaccattaaaagcactt

SEQ ID NO: 13462 - DNA, 301 bp, Unknown
  gut microbiota DNA sequence
aaaagcagatatttaaatagcaatatagggttttttgcattacgtccattatcaaggcaatatttattttttaattcatcatatataaaagaaaaatcgaccaattccctgatttttcttagaatatgatcttttggaacaatcatgtcatataaatctgaataataactaaggccaagtttaagttgggatgataacatttcaacctccgacaattatgataccttaattatatcagatatatgattttacgaccactttttcagtggcgtcctataggtggtgagaaacaagctagtat

SEQ ID NO: 13463 - DNA, 7129 bp, Unknown
  gut microbiota DNA sequence
tagtgttgtcataaatacagaacgaccggcgcctgttgtatttgtcccgtactgttccgtgatcatggactgtgccgaagatgccggaagggctgctgtcaggatcatgacattttttaatgtatcatccagtgcaaccggaacgatccgtaacagtcccagaatcagcaacggaaatgctatctgcttgatcaatgtcaaaaggatcatcctgcgatcctggaaaacagctttgaccggaagtctggaaagagacagtccgactacaagcatggacattccacttgtaatattggacagatatgacagtaattttccaagcacatccggcattggaatctgaaggatacatacgataaatccaaggattactgcgatattaatattgttgagtaccatttttcggatacttaatttttctttgatcggatatttccatgtgagcagtttgattcccacggaaaagatcagaaaattgctgaccacatttccaagcgccatcaggaacattccttttccaccgaagatggataatgcaagaggaattcccatgaaaccgttgtttgaaaatagcatgcagtagatccatatgccctgatccagatctgctactttcatgacttttaccagtaacaatccaatcaggaaagcgcatacgtgtaacaggatgatcgtgacaaaggtctggattccgtaggcgaatagctgcgatctgtcctgatcgatgatggagcagaatacagttaccggcatggttacttttaagaccagggtggaaaaatctgggatgctttctttgtggatgatatttcgttttcctaatataaagcccaggacgatcagggcgaatagtaaaaatacgctggtggctacgacagacatgtggttctcctcttttcttgtgtggtggttatatattttagctttatgagccagaggatcagaaaagaataccgcgcgctaagacgcacgcttgtattattttctgatcccctgactatttacgctgtgaaaaatgtataaatccacgttatcacaacggtctctactttatttcattcgaactaaaccattgtacacctgaacacttacatctttccagaacattttttcatactgaagtagtatttactcatcgaactctactatcacgtagtaacctttcggcgtttcttttacttcaacgacagttccttcccgggattttaatcgttcacgaaattcatagtttgcggacatggcgtaggccttgcccagtgtataataccaggagtttggcagtttgctttctgtcaccggaaggacatcgcccacttccagcagtcctgtccgctccattttaaattccattcttcgcataatgtctagtcttcttccttgtaatctacgtctatgatatcatcttccggattgtgataacgtttgtatgcactgcctgcacgaccgttcaaccacagtccgctgacgccgtcatagatcaggatgataccaactgccatcataccgatttccagcgccaaccatgtgtgaagcatcaggatcacaccaataatgatagttgcgatcgcaaccagaagtccaagccaccagcgcgggctgtcacctttttttacttccagagaaaaaatcagatctttcacgccatggtaagccagcataacaccgatcaaaatcgggatcagtgatacaaaaacgcccggttttgccaaaatccagataccgataactacgcagacccctgccggaagtaaccgcacggaacgtcccagcatttcctgaatacggattccctggatcagcagtacaatacctgccactaataatacaaaacctgcaatgcggcacagagttacaaggatggtccccggccagatacaaaacatcacaccaaatacgatgcaaatgatggatgtaatcatagattcttttttgattttttgaaataattcagacattttgtcctcctctcagtctgtcaaaaagcagactacttaacatagtaatacacaaatatttctaaaatatagaaactttcttcaagtagttccgtctgatgaataactattttttaccgcttactatttactctgcctgaatatcagcaagctgtgcatttgtcacgccgactaagtcctgcggattcattttcaaagtaagtccgatccgtccgccgctgacataaatttcagcaaagttttttgcgctctcgtcaatgactgtcagaaacagttttttcattcccagtggggagcatccgccacgcacgtaaccggtgatttttgtgatatctttcacatggatcatttccacggatttttcaccaacggaacgggctgcttttttcagatctacttcgcatgcgattggaatcacaaacacatagtattgtttgctttttccctgcatgactaatgtcttgtaagatgcatccaccggtgcaccggtaatctcggcgcagtgcattccatcaataaattcgtctacttcgtaagtcagtgcctcgtatggaatcttctttttatccagcatacgcatagcattggtttttgcttcttttcccaaattgattccttctttccacaaaatgttcagagaaataagcttactttttatttctatcactttcaattactcggaagtgatttgtctctcctctcacaaaatctcgtcatttcacgctttcattcgcggagagacatctgctttatttataatttctcgtctaacagttcttcatcgccgatatctactttcttcacttctctgcggaacaagatatcgtacagtaccggaactacgaatagtgtcatgagtgttgcatacagcagtccgccgattacgacgatcgccataccacggctcatttctgctgccgcatcagtactaaataccatcgtacacattgccagtacggttgtcaacatggtcatcaggatcggacgcatacgggttcttccagtttctaccaaagcctcccgtttttccatcccttccattcgtaactggtttgcatagtcaacaaacacgataccgttatttacaacaacacctgccagcatcaggaatcccatcattgctgtcagtgagatttcctgtcttccgataaagagtcccagcagaccaccggtaaatgccagcggaatcgtaaagatgacgataaacggtgataacaggctctggaactgtgccaccatgatcaggtaaataaaggcaatcgccagaccgatcatcaggaaaacatcactcatggcatccatgacttccgtactttcaccggcaatctcaaggctgtaaccgtccggcagttcatactgatccagtttgtcctgcaacgtacgtgacaatactgtagtattataaccatcttctgtctccgctgtcacactgatgtatgttttctgattatctctttgaatagaagcaagacttacgccttcgctcatagttgcaaactcactgagtttgtgtgtttcggtctctgtggttccgtcggatttctgtttatctacagaaaactcatagtccatcagggaatccacatctacggcatcattttcattgacgatttctacatcgtactgtttgccgtccatagtcagggttgtcgctgttttttccgttgtcagatttccggcaagttcctgataaatctgtgccaccgtcagtccctgagccatagctttgtccttgtcaatggtcaactgaatcgtcttatcgccgctctcctgaccattggaaactttggtaaatccttttacgtcagacacaatatccatcacgtcattgctgatctccagcaatttgtcagtatcacttccataaatattcacggtcagtccacttgccatataagaggacatatccatgttagaagtagatacgctgtaatctttaaacttcagatctttgcagattttttccagctcttttgccaccggactgttgtcctttgcgatttcttcatccaataacagaaatacgttcagattatgtgtgccgccgctgcttgtcagcatggaagaagcacttccggaagcactggaagaaccagagatcataccaacgtaagtaacaccgtcaatggcagtcattttttccattgcctgatctgccagtgcaaaagtttcctcatcggtcagatcctcatctgcctccaacgttacggacatctgattaccgcccatactcgggaacaggatcataccggtattcactgccttgtatgcacatcctgccagaagtccgattgcaataattaacggtacaaattttcttctcagacagaaacgcaataccttttcatatacattcagtactttatttaataatttctgtggcttcggctctgtattacgcaacatagtagaactcatcgccggaacaactgtcaatgcgatcagcagactcgcaactaagctgtatgcaatggtcagcgccagatctacgaacagttcacgcaccagaccattgacaaaaatgatcggtaagaatacgcagatggttgtcaatgtagaagatgcaatggcacctgccacctgttttgcacccataaccgccgctctggcagatggtacaccaagtccacgcagacggtaaatattttcgattacaacgatggagttatccaccagcataccgattcccaacgccagtcccgacagggaaatcagatttaatgttacaccgctgaaatacatcagcacaattgccaccaggacactcagtggaatactgaatgctactacgatggttggtttgatggaacgcaggaaaattgcaagcacgatgatcgcaagaattgcgcccacgatcaggtttgacaatacgttctgtacaatcagatctatgtaatcaccctgatccatcagacttgtaatatgaagtccgtcatagtctttttccagctggctgatggctgcaccacaggtatcagacacatctgccgttcccgctgtacttgattttgaaatagaaagaacgattccgtcatgtccgtttacttttgcataggcatctccggaattgtcgatccatgtgacatctgccacgtcagatacatgcacatctcccagtccgtcaatgttgcaaagtacggaagattccagttctccatcagaagcatattcgtcaccgactttcagcaggtactgatcatcgccctgataaatatagcctgccggcattgcgaaattctgtgcagacagtaattgagataaggtatcaaggcttaataaagaatccagatttgcattttttaatgcggtatctctgccctgttcataagaagtctgtgcatcatctaatttttcctgattagactccagtgcagcttcaccatctgcgatctgtgccgcaccggtactgaagccaactgcggcggaaatttttccggattccagagcttcgtaattgtctgtcgctgcttttacctgctcgttaacctgatccacgatcgcctgtgctgcctgaatctcaacttctaagtttgctaattctgtgtcaatctgcggcagacgggtatttacgatctgatccatctgtttcagattgtctgctgtcagtgatgccgctgcatctgactgaccgatctgtttcataaaagctgttaatgcttctaatttttccggatttttcaacgcatcagaaatatccgccggataagcggaaacatccatgccatatcctgctgccattttctgcatggaagcaaaactttcatttacctgctgatactgtgcttcaattccggcatcatcatatgcttttttctctgtctccaatgccatttttgacgcctgcagacctgcaagctgcgcattgtaggcagactgtgtcgccactgccgcatccactgctttgctgctctgcgccagttcactggatgtagaattttgcttgtcttccagtgcctttttggagctttctaactgcgcctttgcactgttcatctggctttttgcatcgtcaatctgagactttgcatccgcaagctgatcgtccacataagctgccagtttatcattcagcgtatcgattttttcctgattcaaacggatttccactgttttttcaatggctccggttgtattgacactggctacaccgttctgacgctccatagtcggaacaacggtattttccacgaaatcactgagttcataaatatcttttccatcataatccacgctggcataaatgaccggaagcatatccatggacacttccatgatcatcggctttccggcgccatccggcagtgtaatcagatctaatgcattggacagttttaccatggcgctgtccatgtttgtatcctctgcgaactccagcataaccgtacaataattttcattggacgtacttgtgacattttccacaccgttgaccgttccaagcccggattccaacggttccgtcaccgtactctcgattttgtctggcgaagcgcccggataggtcgtcactaccacaacatagggcagcgaaaactccggtaacagatccgtggacattctggtaaaacttaccacgccaaggatcagacagaccaccaccgccacaaatacggtatagggtttcttaacgctaaatcttgacatttctttccttctttctgctactataaatttttcaaatttctctctcagcaatctgacattcctgtcgaatgcagatttttctcatactatcgaagtattttaccgtaaactggttggcagctcaactgctttgatgcaatttatactttttttacacttcataacaaaaaagcgacatcaaatacatcgcagccatcagacaggagccgcgacactatttaacgtcgctgttatttctgtattctgttttattccttttttcagcgaaatatattttaacaccagtttttaaaaatcaagcgcagaaaatcacactacaacttctaatatttttttaccgttatagttcagctcttgaatacctgttttctttttcttgttaaaatagtaaaaataattttcgtccattctcttccacaaatttctgatcattatttccatatacagcttattattaactgccaactctgccaaaaacatatcatacaattgtgtgtgaactacccattgtctaaagccaatgggcttcc

SEQ ID NO: 13464 - DNA, 4442 bp, Unknown
  gut microbiota DNA sequence
ttctgaaaagaagatgtcagcttgcgctgaccagaatcacgcaccaagtctcacgtgcgttcgacttgaactgacaagttttgttatgagagaaagtaaaaaaacagggatgtaatgaaatctatgagtaaagaagaaaaaaagaagctgaaagctgagaaaaaacagcagaaagtgcaggagaagcaggaacggaaagaagcccggtctgctcataaggaaaccaagggaagcaaggatcgtgaaatcaagtggggaaaactggacaataccgcacatttatttccggtcattgccggtgaaggcatgacgaatgtctaccgagtggcaattattttaaaagaagaaattcagcaggatttgctgcaacaggcactggatatggtgctaccgaagttttccgtatttaactgcagactgcgacaaggtatgttctggtattactttgaggaaaacggtaaaaaatcgccgacggtacatgaagaacacacgtatccatgccgttatatcgatgagcatcgcaaccgcagctatctgttccgggtaacttattacggctgccggattaatttggaggtatttcattccctgacagatggcaatggtgcattaaatttcttaaaggagctgacgtatcagtatctgcgtctgtcccatccggagcttggagaacagtatggaaaccgactccacaaggacacttcactgaatacagaagacagctttttacagaattacagaaagagccgttttgaaaaatcatataaatcagaaaaagcctatatattaaagggcagtatgttcccggaaggaaaaatgggtatcattcatggccatatgccggtggatgcggtaaaacgcgcggcaaaaaaatacgatgccaccatcaacgaatttctggtagcagtgtttatctgggcaatctatcaggaatatttaaagggcatgccgtccaaacggccaatcactaccagtgtaccggtcaacctgcggccgtattttaattccgtaacgacgaagaacttttttgttatggttacggcaacctttcatccgaagactgaaaatcagccttttgaggatgtgatcggagaagtgaaagaatcgctgcgggaacagatcacaaaagaacatctggaagagatcttttcttataatgtaaccggagagaagacgatgatccttcgaacgattccgctggtattcaaaaaacttggtatgaaatacatttacaacatggcggcaagtgcgaataccgcgaccatcacaaatctgggcaacattcaggtggcaccggaatatgaggattacgtggatcatttcagtgtcatcctgtcgcgttccaaaggacagaacctgaagatgtgtctgtgttcttataagggcacgctgacatccacgatctcatccgtgatgaaggatacgaagctgcagaaagcattttaccgttatctggtggcaaatgatattccggtaacaatagaaagtaatggtgtgtattatgaataaatgttggaactgcggagtggaatttatcgatccgaccaacgtatgtccactttgcaaatgtattacagaacgggatgatgcggaggaagaggagttcaaaccgacgtatccgtttcgtccggacaaggaaataaagaaaattcagctggcaatgagcatctatacgctggcagcaattattgcagaagcaatcctggtgatcattgattttcatgtgggagaccggatcggctggtctatcatgaccggagcctgcatggtgtatgcgtatattacattgaaattttccattcaaaagcacaatggatatcagtttaagatactaatgcagacgctgttaggtgttgctgtcgtcgtactgattgattttttgacgggattttccggatggtcggtaaactatgtgttgccggcggcttttgttctgatcgatgcgacggtaattgttctgatgatcgtaaatagcagaaattggcagagttatattccgatgcagctgttgctcatcgtgctctgcatcattccatatattttgcatcattttggaatttccagtgatagtattatgtgtctgatcgcattgtgtgtggcgatctttgtatttgccggcagtgtgatcattggaggccgtcgggcaatggatgagctgtaccgtcgtttccatgtatagtatatcagatgggagccaatcccacatctgatatagcctccggcaggattgcagaggtgcgcagttgaaggatgtcaagcaattgcatgacgcgcaccttgcagcaagaataccgaggcattcttgaataagagagcaaaaataggattaatataggagagaagtgaatgttacagaccgacaacagtattcgcggaaaagtaatgcgtgaattgatcgcaagggtcgcatccgacaacctgatcggaagaaagttaaaaagcggcgaactgcgcaaaaagatgacagaacccgagtggagagtgccggaattttacaatctgcgcgtgattgaagagaaaaactgccgtctggaattattggagtgtgatatcaaaaatgagcgcctggtgctgcttcagctgcacggaggcggatatatcgggggaatgcgcaatgcgtaccgcagttttgcgggactttacagtgaacttggccggggcatgagcgtcttgacagtggattaccgtgtggcaccagagcatccgtacccggcggctctggaggatgccatcaccggttataactggctgctgcagcagggctggcaggagcatgagattgtagtcgcaggagattctgccggtggtggactggcgttggcactttgtatgtatctgaagaatcagaaccggaagcttccggcgggacttatctgtatgtctccttggacggatatgacgcagtccggagcgtcttatgattttaattatgagcgggatccattgtttggaaataccagagacagtctgatttacagcagggactatattcaggatgaagatccgaccaatccgtatatttctcctctgtatggtaatttcagtggatttccgccgatgttgatccaggtgggaagttatgaaatgctgctgagtgattccgaacttgtggcagaaaaggcgaaacgtgccggctgcaaagtgcgtctcagtgtgtatgagggaatgtttcatattttccagatggcaatgctgatgattccggaatccaaacatgcatggcaggagatcgggcgtttcctggagattatcgaacatcatcttccggcagagcatctggatgaggaagacaaagaaatagagtccaaatttggagaagttgaatatgaataaatttactgattgctgtctgtgtccgagaaactgtcatgtggatcggacacaggggaaaacaggttactgtggacagaccgatcagatacgcgcggcacgggctgcattgcatatgtgggaggaaccctgcatatccggcgatgcaggttccggagccgtgtttttttcaggctgtcccttaggctgcgtattttgccagaatcattccattgcagcaggaagattgggaaaaacaatcgccacggagcggctggcagagatatttttagaacttcaggatcagaaagcatggaatattaatctggtgacggcggggcattttgcgccgcaggtagtccgggcgctggagttggcaaaaggacagggattaaaacttccaatcgtgtacaatacttccggatatgaaaaggtagaaacgttgcggatgtttgaaggcctggtggatatttatctgccggattttaaatacctgagtgcggagcttgctgatgcttattcccatgcggcagattatccgcaggtagcaaaactggcgttgcaggagatggtgcggcaggtgggaagtgctcagtttgaaattgtatccggggaaaattccgggagggttacggatgagctgctcacagacgtggattatggagacggtgaactggaacggatgttgcagggcgtggtagttcggcatctggtgcttccggggtatgtagaagaatctaaaaatgtgattcgttatctatatgagacatatggaaatcagatttatatcagtattatgaaccagtatacgccgatgtccggaattgaagtacagtatccggaacttggaagaaagattacattgcgagaatacgacgaagtcgtggattatgcaattgaaagcggtgtggaaaatggatttattcaggagggggagacagcggaagaaagttttataccggaatttgatacttttggagtgtagttggttcggataatgataaggtttgaattttaggtagtgaaggcgccagacatcaatcttacctctgcagctgataatcgcacgccgaggaaagattgcctgtctggcgccatatacgttttgccaattactaattttatactacaat

SEQ ID NO: 13465 - DNA, 175 bp, Unknown
  gut microbiota DNA sequence
aacagcgaagtaattcgcgatgaaatgagttcgagagaacaaagcagagacgaaagtcaaagcaacctaaaaacagtaacgtttggaattaatgaatggttaaaattagccagttgattctgaaacgggaaaaactttttatgagagtttgatcctggctcaggatgaacgctgg

SEQ ID NO: 13466 - DNA, 161 bp, Unknown
  gut microbiota DNA sequence
tcttcggtataatggattcctagaatttcccctaatctaagaccggtttctgccatcattgctatcagcaatagatctctatcattcgtacaggcatttatcagctcctgtatttcttcggatgttatttcttccagattagattcttcttctttgaagaa

SEQ ID NO: 13467 - DNA, 213 bp, Unknown
  gut microbiota DNA sequence
ttcttcaaagaagaagaacctaatctggaagaaataacatccgaagaaatacaggagctgataaatgcctgttcgaatgatagagatcgattgctgatagcaatgatggcagaaaccggtcttagattaggggaaattctgggaatccattataccgaagatattgattttgaaagaaggacggttcgggtaaggtatcgtgaatccaatacc

SEQ ID NO: 13468 - DNA, 6806 bp, Unknown
  gut microbiota DNA sequence
ttctgaaaagaagatgtcagcttgcgctgaccagaatcacgcaccaagtctcacgtgcgttcgacttgaatcaaacgtgatttgcacttttttggaaatttatataacttaaagaaatttaaagtatatcgaggaggagtaccaatgattaacgaagttatggagtacaataagaaatttgtggaggataaagcatacgaaccgtatctgaccagcaagtatccggacaaaaaactggcaattctgacctgtatggatacacgtctgacagagttacttccggcagcacttggtctgaaaaatggcgatgcaaaaattataaaaaatgccggcggcgtgatcacacatccatacggtagtgtggttcgaagcctgttagtagcgattattgagcttggtgtagaagaagttatggttatcggacatacagactgtggggtacagggtatggatggtggaaaacttctggaagagttgacacacagaggcgtttcacaggaacatatcaatattgtgcgaaacagtggtattgatctggaaaaatggcttggtggctttgaatgtgtggagcagtctgtcagagataccgtgattgcattgaaaaatcacacactgatgccaaaggatatcacgatcactggatttatcatggattccgtaaccggtgaattacgtcaggtgccagtagaagaataagcgattttacacttttctaatatcggaagcagtgctatactgatagagattataaaacatatgataaaaacatacgaaggagaaatttcatgcctgtatttgattttaataataaaccagataaaaattcacatggaaaatgtacttacaccatggttttttccaatgcttccgaagcatccgcagaatctccgattctgttactggataacaagattcgccagtggaagcatcattcctgtggtgtttttaccaatcctgtaaaacgcacttcctttgaatttgaggaagaagatggcaagatcagtgcggatattttacagattgatgcacgttttgtcagcctgttgcgctggcttggtgaaaaccatattaccgtacgcctttccggagaaaaccgtccagatggttatgctgtatacaagatccgtgagattgcctttggaggtggcacaaaactgtccgctgaggacggatttttacagtttatgatggagcgtctgtttgccagcaacgcaccgacagaggtgtttgacgaagaagaacaggaagaagaaggcgacagcatgaagctgaccagtctgcagagtatcacagattttatgaactgtgcaggacgcactttgccggataacattcgtctgtgggcgcgtcgaaatttggcagttgcccgttcccatgaagtttccgcggaggagcgccgtcatgcacagcgtgctctttctattatgatgaacatccgttggaagagcaattattttgaagcaatcgacccggaagaagcacgtcggattctggatgaagaattatatggtatggagcgtgtaaaacagcgtatcatcgagacaatcatccagatcaaccgtacccatacactgccggcttatggtctgcttctgatcggacctgccggaaccggaaaatcccagattgcctatgcggtagcacgtattctgaaactgccgtggaccacactggacatgagttccatacatgatccggagcagctgaccggaagttcccgtgtttatgccaatgcaaagccgggtattatcatggaggcattttccgcagcaggagaatccggactggtatttatcatcaatgagttagataaggcttccaatggaaaaggaaatggcaatccggcagatgtactgctgaccttgctggataaccttggatttacggataactacatggaatgtatggttccgacggttggcgtatatccgatcgcaactgccaatgacaaagaccgcatcagcgcaccgttgatgtcacgttttgcagtcattgagattccggattatacaccggaggagaaaaagacaattttcgcccgtttttcactgccgaaagtattaaaacgtatgggcatgagtgaggacgagtgcatcgtgacaccggaaggcttagatgcagttgtgaaaaaatatgagaacacaaccggtatccgtgatctggagcaggcagcagagcatatcgctgcaaatgcactgtaccagatcgaggtagatcatgtgacatccgttacttttgatgcggatgcagtagactctttgctggagtaatgcctcagatcataatacacagatcctttggcaacttttgaagccacatgtgcgccaaagacacccagtcgtgccatgattgccagtccgaaccggcggaaggcatattcggcaccaaaaatctgacggatatccttcacggatttgaaatcataaaaatatttggacgcttcataaaaagtttcctgcaattcccaaggcgacatatgcttggggagaaaggtgacattcatcatgtcaaaacggctccagtcgctggtgatcatacggtgatcctgacaaaactggtcgtaaactggtgtgccgggaaagggtgtcaaaatagcaggttgtaactgataggcatggatagattttgcgaaagcaacacttctgtccatgtctttttttgtatcttcatccagtccaagaacgatgcttgcaatcatacggattttgtatttttcgcaggcagcaccggcttttcggatatcttcgatattctgtcctttatggatctcatctaaggcattctggttcagcgattcaatgccgatcaacactctggtcagatgcgcgtcatgtaaaagctgcaataattccgcatcattcgccagatccgttcgcccaaagaaaaagctctctttgaacgtaagatgttcggcgatcatccggcggcagatttcttttgcccgttctttgtccgcggtaaaattgtcatcttcaaaattcagatagcgaaagcccatttgtttatacatgcggatctcatcaatgacgttatccacactgcgctgtcggtaaggggcaaacatgcgggacgtggtgcagaacgtgcagcggtaggggcatcctctggtggaaataacatttgccgcgacgcagggtgttttcagaatcgaataatctggaaatggtgcctcatccacattggtcagagagatcccctgcacgatccgggtgtttaaacgtccttccactacatctaaaataactttttcgccttccccgacaatgacctgatctgcatgctgcagggcttcttcgggaagccaggtcggatgcataccgcccatgatcacgcgggcattggaatgtttgtggatgatgtctgccagttcataacttctgggagcattggaggtcatcagtgacaggcagaaaatatccgtatcctttagcagatgttttaacggcaggcgggcgtttaattcttcataggcttccacctgatacccggctttttttaaaatgccaccaaggatcaacggacctgtgatggagttggactgtccgtaaattttcccaccaagacgatagagaggaatccggcgcaggtcggaagcaggtacaataaatacaattttcataattaaaaacctcacagaaactatcttttttgcaagtattgccattccgtgggaatctatgccaaagtaaatcaaaatcgcaacagtcgacttgtataaaaaattatggtacaatgagcgcaattggatgaggaatgcagaggacattcttaaaattatgaggtaagtgagatatatggcaaatacaaatagaagaaaacacatctgtaccggactgatggcgcatgtggattccggaaaaaccacgctgtcagaggcacttttgtatacttccggagcaattcgaaaacttggaaaagtagatacaaaagatgcatttctggataccgatgagcgggagcgtgccagaggaattacgattttttccaaacaggcggaactgacctggcgcgacacggatctgacattattagatacaccggggcatgtggatttttctgcggagatggagcgtgtgcttcaggtgctggattacgcagtgctgctgatcagtggatcagatggtgtgcagggacatacgcagacgctgtggaatctgttgcagcagtatgagattccaacgttcttttttgtaaataaaatggatcagccgggagcggatcaggcagctgtgatgaccgaattaaaagaacggttatccgaaggatgcattgacttttccgcttcgtccgttttggcagatgcagtgatagcagacgttgcagacacgaaaaaggattatgatgctaagcagacgatggactctggaatgaatacagatcagagtgttttatctttggaaacatggtatgaggaactggcaacctgtcaggaggaagcactggaaacatatctggaaaccggaacggtgtctgaggcgcagattcgggcaatgatccggaacagagaagtatttccgtgttattttggttctgccctgaaaatggaaggaatcgaaacctttttaaatggatttgagttctggacggaagaagatacctatccatcggaattttctgcaaaagtgtacaagatttccagagatgagcagggcaaccgtctgacgcatttaaaagtaaccggcggtgtattaaaagtaaaagatcttcttcgcacgaagtcagacggggaagatgacgtgttggaaaaagtcaaccagattcgtgtatattccggcgaaaaatacgaagtccgtcagcgggcagaagccggagaaatctgtgcggtcaccgggcttgcagagacctatcctggacagggactgggagaagaagcggaaacgctgccgccgctgttagagccagttctgacctgtcaggtttgtttcccggaaggctgtgatccggcgctgatgctgccaaaactgaaactgctggaagaagaacagccagaactgcacatcgtctgggatgagcagttacaggagattcaggcacagatcatgggagaaatccagacagaaattttacagagcgttattgcagagcgctttggcatagatgttacttttggaaaatcccatattgtatacaaagaaacgattgcaaatacggtggagggcgtcggacattttgaaccgctgcgtcattatgcggaagtgcatttattactggagccgcttccggcaggcagcgggttacagattgacgtagattgcagcgaggatatgttagataaaaactggcagcgcctgatcgtgacgcaccttctggagcgggaacatcgtggcgtactgacaggatctgctatcacagatatgaaaattacattgatcgccggtcgggcacatcagaaacataccgagggcggagatttccgtcaggcgacttaccgtgctattcgtcagggtttgatggaagcggaatcggtattgttagagccatattatcaatttcggatagaactcccggagcagatgattggacgggcaatgacagatattgaaaaaatgaacggcacttttgaaattacacaggcacagggagggctttcggtattgaccggacgcgcgccagtcagtgaaatgcaggattatccgaaagaagtggcagcttacacgaaaggcttcggacgtattttcctcacattggatggctatgcgccatgccataatgcggcagaagtcattgatgcgattggatatgatgcggaacacgatacagccaatccatccggttcggtattttgtgcgcatggtgcaggttttacagttccatggaacgaagtaaaagagcatatgcatgtggaaggatggcagccggaaaccgtgaaaagggaagaacttccggaacgggcaacacgaagtgtcatggatgagtggatcggtgtggatgaagtagatgccattctggaaaaaacattttatgcaaacagcggcgctcgaacccgcagaaacggtgttgtacgccggcgcagagtggaaagtcggacggaatctgttaccagaaattttacatcacagccgaaaaaacaggaatatctgctggtggacggttacaatatcatctttgcctgggatgaactcaaagaccttgcaagagaaaatatggattctgccagaggtattttattagacaagctgtgtaactatcagggtatgaagcagatcgaagtcattgctgtgttcgatgcataccgtgtgatcggacatgagacagaatgcttcgattatcacaacattcatgtcgtatttacaaaagaagcagaaactgccgatcagtatattgaaaaatttgcacataccaatgcgtcaaaatatcaggtcacggtggcaacttccgatggactggagcaggtcatcatccgtggcgaagggtgccggttgctgtccgccagagatctgcatgcagagatggaactggtagaaaaacagctcagtgaaacttatatgcaggagtcaacgacgaaaaatcgcctgatcggggaacttctggaggcacaaaagaaaaatggtgcctcaacgtaagtatgtaagtatatgaagagaactccagctattttgtcttgtccgctaataatcgcgttccaagaaaaaatagctgaagttctctatttcagttaagagtgaatatgggcaagtttattcagtaacgtaaatgcagaaaaaagaaatcttttcctcaaagcaggcgtcttagcctgcgtgaggtgacgatttcttttttctgtttacaacctaaataaaatcccccctcaaataaacacagcc

SEQ ID NO: 13469 - DNA, 4602 bp, Unknown
  gut microbiota DNA sequence
accggcagtttaccgtcaataacttgcaaaatgcgaaaaatgtggtataattagcactcaataggacactttgctaacagaaggaggcgatcgtatgttagttttaccagtatatgatttactgctccttccgggcgtcacatttaatttcaaaaaagacgttctggaacgcatgcaggttgaaaaagtagaaaagggagaagaaattctgtttctgatccagaaagaagaaaagaagcgggaagaccttatcgtagatgattttcaggaaaaaggtctggtaggaaccgtagaaaatgtggatgatgagggaaatatcagtatccgtgttcacaatcgtgtggatgtttctgacatagagataacggatggagcttttaccgcggatgcagcgatctgttccgaaatcgcagatctgccggaggaagaagaaaaagagatttataaagaagcgaaaaagagtctgatccagtttgtcagcggttttcagtggggagtctgggcgcgggcgtttattcagcactggagtaacatgacagagatcatctgtgcgctgtccgcttatttgagtattacgccggaggaaaaatatgcgatcattgctgcagattccgtgcgggaacgtacagaactgattgagcagtccatttatgaatttatcgagatggcgcatgtcagtgatgaggcagaaagcgcgcagcaggagacacatgaacgtgtttaccgggagtctgctttgaagaagcagattgaatttttgcaggagcagttagatgagatgcatccggaaaatatttccgatgtccgcaaatttgagaaaaagattcaggaatccggtatgaatgaggaagccagaaaagaagcggaaaaggtgctgaaccgtatgaaacaggagggcaaagacagccatgaatacggtctgctctatgattatctggattttatgacttccctgaactggaaagtggcagcgccggtagaaattgatttaaatcaggcggagcaggtgctggatgagcagcattacggcttgaaaaaagtaaaagagcgtatcatagagcagattgcggtgatggcattgaataagaagcagtctggttctatcctgctttttgtcggtgcgccgggtactggtaagaccagtatctgccagagcattgccaaagcactgaaccgggaatatgtgcggatcagtcttggtggtgtccgggatgaggcagagatccgtggccacagaagaacctatatcggagcgatgccgggacgaattatggaaggcatgaagcgcagcggcagttcgaatccggtcatggtactggatgaagtggataaactgtcccatgattacagcggagatccggcaagtgcgctgctggaagttcttgatccggagcagaatttcagttttactgatcactatatgaatgtgccgtatgatctgtcaaatgtattgtttatctgtacagcgaactctgttgatacgattccggagccattgctgaaccgtatggaagtgattcagttcccaggttataccgccgtggaaaaatttgaaatcgcaaaaaaatatctgcttccgaatgcgatgtccaccatgggactgaaaaagcagaatctgaaggtaacggacgatgccatgcgtgcgatcatcagtgaatacacaatggaatccggtgtccgcggtttaaagaaaaaactggagacactgtgccgtcaggcagcggtaaaactggtcaaaggcgagcagaagagtattaccgtaggggtaaaacgtctgaaagaatttttgggacgtaagcagttacatcacgatgtgcgtatgcaggaagcacagccgggggtggtaaccggactggcatggaccagcgcaggaggagaaatcctctttattgagactgcaaaaatccgcggtgacggaaaagtgaaagtaaccggacaactgggtgacgtaatgaaagagtctgtgcagatcgcgctgacactggtgaaatccatgtttccggaggagacagaagtcttaaaagaatcagatctgcatatccatgtgccggcaggcgcagttccaaaggatggtccgtcagcaggtattacgatcgtgacagcgttgacatctatgctgttgaacaaaggtatttccccggaatttgccatgacgggtgaagtatcattgcgcggcggtgtaatgccgatcggtggtcttcctgaaaaactgatggcggcacagagagccggtatcaagaacgtatttatcccgtatgataaccgcgaagatctggaggatgtggcagaggaagtaaaagcagagttacatattattccggtcaaacgtgtggaagaagtattgaagcatactggtctgataagtgaagataaataaacagaaaaagaacgtgtctcttaatatgtaaggcacgttctttttccatgtttcatacaaggtttgaaaagaatcgtcgttaaaatctgttgtctgaaataagtatatcagctatgattccttcgctgtatttggctttttatatggtttttgagtgagatcggagcgaatattttttacgacctccagcatcagttgttgctgctcatctgacaggaggacaaaataatccagaaactctttctgcgtctcattcaccggatataatgtactttgattatccatgaaaaactgtgacagtgtgatatcaaaagattcgcagatatattctaatgttgcgatagaaggaatggtatttctcttacgcatattagaaatcgtggaagttgataatccggacagtttcgaaagctgataatcgtttaaatgttgtctcgccataatctcgtcaattctttttagtacatccatgttgaaacctcctgaaacttctgcccgtataaatagtagtaaacaatcgtataaattgcttatacaagtattctacctagttttatagaaataaaatagcgtacatatgtatgctaaaattactcaagtgtgatataaaaaatctgtttatactttttttatttgacaaaatattagcaaaagggtagcatgagtgctagaagtgtcttatttcagtcagtgtatacacgaaattttcagagtgtttgacttgtgtagatacattttgcatccatggttagagtatgggtgtttgatcgaataacggaacaggaggagaaactatgtacgataaagagatgctggataacttttccagagattatgcacagaaatgtcgggtgacagaccagatttccgctgaattgtttgacgcaaacggtgtgctgcgtggacttcgtgataaaaatggaaatggtgtcgttgccggtttgaccaatatatcaaaaattgaatccttccgaatggaaaatggacagaagatcccatgtgatggtaatctctggtatcgtggatacaatgtcattgatctggtaaaaggattcgagggcaaacgttacggatttgaagaagttacttatctgctgctgtttggcgaactcccatccccggcacagttgaaaactttctgtgaagcactggcaaatgcacggcatctgccgacgaattttacgcgagacgttattatgaaagcaccgagtgccgatctgatgaactctctgaccagaagtgtattgacactggcatcctatgatgacgggattagcgacagttctttacagacggttctgatgcagtgtatgaagctgatcagtgagatgccgatgcttgccgtatatggttatcattcctataatcactttcttcgggatgagagcctgtatattcaccgtccgcagccggagctgtccaccgcggaaaatattttgctgatgctcagaccggataaaaaatacaccgcactggaggcacaggttctggatgctgcactggtgcttcatatggagcatggcggtggaaacaactcaacatttacgacacgtgttgttacttcggcaggttccgatacgtattccgttatcgcggcagcactgtcctctctgaaaggaccgaagcacggcggtgccaatatcaaggtcgttcagatgatggatgagatccgtcgggaagtatctgactggggtgatgaagacgaagtaaaagcataccttggaaaactggttgataagcaggcgtttgatcgaaaaggtctgatctacggaatgggacatgccgtatattccctgtctgatccgcgtgcccgcgtattcaaacattttgtagaagcacttgcgattgaaaagggcagagaaaaagattttgccctgtattccatgattgagcgcctggcaccggaagtcattgctgagaagcgtaaaatttacaaaggtgtaagtgccaacgtcgatttttacagtggatttgtatacagcatgctggatattccgctggaactttatacaccgatttttgccatggcacgaatcgttggatggagtgcacaccgcattgaagaactggtaaatgcggataagattattcgtccggcatacaagagtatcatgcaggaacgcgattatgtgccgatggatgagcgtaagtaatatttttttacagatagtgggcagttgttcgcgcaggaggatgcgtgaacggttattgagagacagactgca

SEQ ID NO: 13470 - DNA, 7253 bp, Unknown
  gut microbiota DNA sequence
taaaagttgaaataaattgggggacatgaaaaatatgtttcatgagattgatgaaaatacatgggatcggaaagagatatacgatgcattttatggttatacctatgcaatgacggtacagctggatatgacagaactgtatgcacagatgaaagagcatggatacaaattttatccgacgatctgctggctgatcacaaagacagtaaattcagatgtggactaccgtttcggaaaagtccatggtataatagaatattatgatcagatgaataccagctatacgctgagaagaagtgcaaaaccgcatctgttcactcacatggtgaccgaatataacgaagactttgagacatattatgagcagttcttgaaggataagcagaaagcagaagctgctgaccgcctgtattattatgaagatgccagaccggacagcgttgatgtgtcgacgacaccggatacgtcatttacggcaatctcttattccattccggatacgttttatcagcgtggcggagataatatgcgttatacaccgtttacaacggttggacgtttttatcagaaagacggacgcgtgatgctgccggtaacgggcagtttccatcatgcagtcaatgacggttatcatgcggagaaatttttccggttattgcaggagaatatcaaaaaaggagtaacgcagacgcatgatcgataaaaatctttttctggaaacattacatgaagttgctgagatcgcagctacttccggagaaaaaatcaaaccggaggaagttcataaatatttcgaaggaatggagctttccccggagcaggaaaaaatggtatatgagtatctgaatcttccaccggaagcaaaacaggcaccggtgacagaggaagaagaagttaccgaagacgctgaggatatagagaccgtggaagtatattccacgacagattcttccaaagacattcagatcggtgctgaccatgccgcagaagacgaagaagatgatgtgccacaggcaaaagatgtggaaaaattgtctgattccgtttactatcggatgtatctggatgaagtcagaggacgcggagaggcagacgaagcaaaaatgcgggagctgtatcagcagattttgcagggagatcaggatgctgtcaacggaatcgtagacggatggttgatgcggatcattcacatggcgggtatgtatgatgatgtgccggtcaatatggaggatctgattcaggaaggaaatatggcgctctggatggcgctgagtgcattgccggaggtagaaggagccgcagagctggattcttatctggaaaaacaggtagtggcagcatttgagaatcatatccgtgaggtgactggcgataccgatcaggtgcaggcggtgcttggaaaggcagcgctgctgcatgaggcacgtaagtatctggcaaaggagaattcacaggatccatcgattagacagcttagtgagtacacacatatttcgccggaagaaatacaggatatactggcgctccagaaggaaaaaacggagtaaaagtagtgaagaaaaacgactcaatattgaatcacgggaactaagacgtccccttagattcaatattgagtcgtttttcatacaaattactgaaagattcgttttttctttcttccgcgcccttctataaattaaagtataaaaagcgaaattttaccgttcttccggcagcagatatttattgaatagcggaatgaccggatttaggttgttttttctccagacagcgacgagatgcagtggatctgtcttgtaaaatggcaatgacagcaccgcagtattggagttggagatacagttttcgtccagtacggagaatcccagtccggcttctactttcaacagaatattctggatggaggatgcgtaaatggtattggacggtgtaaatccatgtcgttcgcaaaactgcacgatgttgttgtaggcaccttttgaaatggcaggatcgatggcgatcatggtttctgtactcagagagtcgaaatgaatttcgtctggtttggccagtgggtgtgcctttgaaatgacacattttggtgctgattcgaagaaaacctgatagatgatatcatcggtcggataatcgattaggtcaaaatcaagtgtcagcgcaatatcaattttaccattcataagggattcccgcagttcctgaaagtttccactgatgatatcgatcttgatgttcggatgtttttcgcgaagtgcatgcaaggtatgcggcagaaagttttcggaacgctgtgtttcgatgacaccgagtacgatggatccattttcaccaagttcggcgttgcgtgctttttgcacggcagcttcccctaattttaataattttgaaaattcttcgtataataccgcaccacagggggtgaggcgtacgtatttttttgtacggacaaaaagctgcattccaagttcttcctcaagattggaaatgtttcggcttaaggaagactgtgccacaaacagatgatttgcggcttctgtgaagtttaagtattcagctacattcaaaaaacatttaatctgaaaaattgtcatcgtatttctccatgaattattgaatataaataaaaagataagtttgttaagcaaaaaataaaaaagtttaagcaaaaagttaagcgcaaataaaagtctggttaccggcatatagagtatgttagtaaataggtgcaattatttgcatgaaaatttaaggtctgcgcagcagcacaatttcttccttgtacggtggatacgtttttttcggattttccggatcgactaagtatggagtctccagaatcttcggaatgttttcaaaatccggatgatgaacaatggtgtgcagtgcatcaaaaccaatctcaccctgtccgatatttgcatggcggtctttgtgtgagccacaaggatttttactgtcattgatgtgaaataccgcaatctgatcttttccgagtatccggtcaaactgttcgattacaccgtcaaaatcatttataatgtcgtaacctgcatcgtgtgtatggcaggtatcaaaacagacacgcagacgttccggatgacagactccgtcataaatcgcagcgagttcttcaaaggttcttccgatttcggaaccttttcctgccatcgtttccagtgcgatatagcatccttcggattctgccagcacttcatttaatcctttgatgatctgagctgttccggcttccacaccggcaccgacatgtgctcccggatgcaggatcagaatctgacttttcatggcaacggtgcgctgaacttccagtgtcagaaaatcaacggcaagctgaaacgtttccggttttaccgtatttgccagattgatgatgtagggcgcatgtacgacgaattcttccatgccgtactgatgcatggcttcccatccggcatcgatatttaattcttccaccggtttgcgtctggtattctgtggagccccggtatacagcatgaacgtatgggctccatacccggcagcttccctgacagaatttaagaacatgtcttttccggacatgctcacatgagaacctattttcaacatatttcctgtctgccgcgcttgtaaaaaacacggcatttccccttattcatagttgtttccagttaaaacgattatataagatatatattttcgtatatgtatttagtatagtacaaaaaataaaatttgcctagcggtaagtagaaaaagaaggaccatcttaagtgaaaaaacttttgcccaaaagcgcgttgaaatgaaaagttctcactttaaggttggcaaacggatggaaattaggtacaataaaaagtaattatgtatgaaaagatgactttttatagcgacacagtgaaaatacataaaaatgtgtgttcagaatgattcctatcagaaatgctctgtgtgggtgcacattgtctgagagacgatggttttatgccgactgaaacaaagtgtagagtatagtaattctgagcgtataaaaaagattgggagaggaaaaagaatgcctaaatttgaggtggaattaaaaaaagtagtggatgattcctatgagattgagatcggacatggacttctggatcgcgtcgtagcggatctggcaaacggtctggttggaaaacttcataaatttgcgattatcacagacagcaatgtggaaccgttgtatgcacgtccattggaacagaaattgctggatgccggatatcagaccgatgttttcgtgttcccggcaggagaaaaaagtaagacacgccagacaaaggcgatgatcgaggatgcgatgctggaaaaaggctatcgccgcgactgctgtattctggcagtaggtggtggtgttgttaccgatctggcaggatttatcgcaggtacttatggcagaggagtaccgtttattaattatgcaaccagtctgttggcagcagcagatgcttccgtgggtggcaagactgcagtagataccccgctggcaacaaatctgatcggactgatcaatcagccgaaaaaagtatatctggatctggatacctggaaaacattgccacagcgcgagatttacagcggactggcagagaccatcaagcatgcgtgtctggctgatgcagcatttttcgattatctggaagcgcatatggatgaaatcctggagcttgatcaggaagcatgtgagcatatcgcagagaaaaactgtagcatcaaatatcatgtagttatgcaggatgaacgcgagcttggattgcgcgaagtgttaaatcttggacataccgtgggacgtgcggtggagaccgtcagcgattatcgcctgctgcatggtgaggcagtttctatcggtctggtggctgaggcgcgtctggcacagaacatgggatatttgtcagaagcagatgctgagcgtgtgatcgcattgctgaaacgcgcaaaattgccaacagagattccggaatatatcgaccgggaagcactggtgaagaaactgtatacagacaaaaaagtacgtgacgggaaattgcgttttgtcattcaggatggcatcggtgccatcgcaaccttcggtgagaatgtttatgcatctccaatctctgaggaaaaagcaagagagatcattatgcagttatagtatatgctataatttgtaaaatactcaccgcttgtaaaagtgggagtctcaattccaactgagataatggaggcaaaacgcaggaatgagatatgagcgcaaaaaggaggaaaattcggaagttttttatgaagtgctggacaacagtacaaaagcagcagaattttcctatcaacagaaattcgatgagacgggacaggtctgtgaacagttctggatcaggcggattcatctggagcagaagtgtctggactaccgttatctggatgcgatactgcagtttatccagtataaatgctggtgcagtggctgtcggtccatgtatgtcagactcagcgtcagaaatttgatggatatcgagcgatacaagcgttatggtttttatgtgatcgcgcaggaagaacagacgaccgtacagggggaggtttcctgtgcctatgttctgaaatatccattgcccagagagtgggaagaaatgatgaataaaaaagagagggctttttactatgaaggaaagagataaattcgggtcccgattgggattcatacttgtgtctgccgggtgcgcggtcggactgggaaatgtgtggaaatttccctatatctgtggtcagaacggcggcgcggctttcattctgatctatctggtatttttggcaattcttggtttgccgatcctgatcagtgagtttgcggttggacgaggaagccgcttaggagcatctaaggcatatgaaaaattagagccggcaggaaccaaatggcatcattttaaatggttttctattttcggaaactatctgctgatgatgttttacaccatggtcggcggatggatgctgttttacatttaccgcagcgccagcggaaaactggcaaccatgtctgcagatgaagttggagcagcattttccgatatgctggcttctccgggaacgatggttggctggatgattctggcggttttgattgcttttggaatctgtgcacttggcttgcagggcggtatggaaaaaatcatgaaagtcatgatgagtattctgatcgtgttgattgtcattctggcgattcattctctggtgttgccaaacgccatggaaggtgtaaaattctatctggtgccgaatctggatgccatcaagagtcgtggtcttggagccgtagtatttgacgccatgacgcattcattctttacattgagtgttggtatcggtgccatggaaattttcggaagctaccagaagcgggagcattccattccgggcgaggcaaaaaatattgttattctggatacgtttgttgcattaatggcaggatttatcattattccggcatgttttgcatatggtgtacagccggatgcaggtccgtccctgctgtttatcaccttaccaaacgtatttaacaacatggcaggcggcagagtatggggaacctgtttcttcatctttatgtcctttgcggcgctgtctaccatcattgccgtatttgaaaatatcatatccttttatatggatatgggcggctggagcagaaaaaaagcagttgtgttcaatattgtgcttattatcgcactgtctctgccggcggtacttggatttaacctgttatccggtttccagccgatgggtgcaggaacttccgtgatggatctggaagattttctggtatcctataacctacttccacttggaagtatgatttttgtcctgttctgtgtaaagaaaaatggatggggctgggacaatttccgcaaggaagcaaacgaaggaaaaggtatgaagatttccaacaaacttcagttttatatgacctatatccttccggcaatcattgttgtggtatatctgaagggatactatgacacatttgcgaagatgggaccgaaggttttggcaggctggatggcatttgcggcagcactgttgatcacaatttttaccctgtcttctttaaagaaaaaagaaaaatagtgaagtttcggagccatgtcattgttgcatggctctgacttattgtgaaaaaagactactagtgttagtttaaaaacagaatgtgtttcaagtcgaacgcacgtgagact

SEQ ID NO: 13471 - DNA, 688 bp, Unknown
  gut microbiota DNA sequence
ataaactacaagaagtcaatttatacaaagtcaaagaagtcaagaggagatttgaatgaacgaatttatatcaaattcaggcacactaataaatcctgacagcgtttacgatcaggaaagattcatcaatatacttcaaatcattttacagaaaaaaacacaaaaagaattatctgaacaaacaggcttaaataatgcaaccatttcacgaatgctcaacggtgtccgatctggaagaccatataaaagcactattgataaaattgcaaaagccattgatgatccagaacttatccaagaattatatgatgcaacgggatattcttctaaaaaaatacgggaacgaaaaaagataattgcagacaatggattttctttggatctctctactgttcaggtgcatgaaaagtttttttctaccttaatgcgtggactttccatgatgacaagtcttcataaagttgaatggacaataaaatctggaacgcccagatcatacgattatttaattgaattaaaagagggaaatatagattattggtatattagatatgtagatagaattgcttctgatgaagaaaggaaaaaagccttaactgccatttatggagaatttgcaaaattgaaattgggcggaaaaatcaaagtttcttgcgccactccttcttacgaagattatgattatttt

SEQ ID NO: 13472 - DNA, 226 bp, Unknown
  gut microbiota DNA sequence
tacaataagttttatttcacaatttttaaaatatctggatggacagagtaagaaagtaactgaactggagatgcaagatatagcggattatgtgtctgttttggatgagtccgatattaagtattccacttttaaccgatatatcacacatatgcatacatttctacagtttttgaaaatgaaaaatattgaagtgttgaagttttatccggaacgatttttaaaa

SEQ ID NO: 13473 - DNA, 145 bp, Unknown
  gut microbiota DNA sequence
gcaaggctgttggggcataaggatacacgaaccataccacattatcggcggttaagaaacgaagcattagcgcaggatacaaaggctgtacgagatgaaatgaatgaattattagcacaatacaggagggaaaaggaaaatgcag

SEQ ID NO: 13474 - DNA, 306 bp, Unknown
  gut microbiota DNA sequence
atgaaaggtggaggggcgattaagctcctcttttttgttcctaatggttaatctatgatagaaaagaaaactgtttgtcagattgttgacgagtggctggcaggaaaggactacttccttgtggaggtgacaatcagcccggatgacaagattttggtggaaatagaccacaaagaaggtgtttggattgaggactgtgtagagctgagccgctacatcgagtccaagttgaaccgtgaggatgaggattatgagttggaagtcggttcggccggcatcggacagcccttcaaggtactgcagcag

SEQ ID NO: 13475 - DNA, 145 bp, Unknown
  gut microbiota DNA sequence
ggatatcatgatcgtatctgtggatggattgaccggattcggggatgcgattcatgcagtattcccacaggcggagatccaaaggtgtattgtgcatcagattcgttattctacaaaatttatctcttacaaagatttaaaacca

SEQ ID NO: 13476 - DNA, 9337 bp, Unknown
  gut microbiota DNA sequence
acggttgcagaggatttttctgattttaatggaatggtagatatagatacaggaggatgaaaaaatgtacctgatcgtaggacttggaaatccgaccgcaaagtatgccaaaacccgccacaacgcagggtttgacgtcattgatgcgatcgctgataaatatggaattgaactgaatctgcgaaaaggaaatgctttttgcggaaccggatatatcgaaggacagaaaataatgctggcaaagccgcagacgtttatgaacttaagcggcgacagtgtcagcgcactggtaaatttttataaattagatccgacacaggagctgatcgttgtgtttgacgacatcagtctggcgccgggcaatttgcggatccgcaagaaaggaagcgcaggcggacataatggaattaaggatatcattgcaaagaccggaaccgatcagtttgaacgggtaaaagtcggtgtcggtgagaaaccggcaggatgggatctggcagatcatgtccttgggagattttccccggaggatcgggaaaaatttgaggatgccgtaaaagatgcggtggatgctgtcagcctgatggttcaggatcgaaccgatgaggcaatgaatctgtataatcgtaaaaaagaagcataacagaatcgtgatcttataaagaagcataatagaaccatggtttttcaatagaataagagtgcaggaaatcatgaaacatatcaacagatagaaaagaaaggagtaacactggcatggatgcttttgtacgtccgttgtatgaattaaacagctttgaagaactggagcattttgcagaaaaaccgggaactgtgatctcagcttccggttgtatggatgcgcaaaaaccacatatgatgtatggactgaacaatggcaggggaacccgtgtcattgttacttttaatgagcagaaagcgagggaattgctggaggcataccgctactttgaaccgaaggcagtgtattttccggcaaaggatattttgttctatcagtcggatatccgtggcaatgcgctgacacaggagcggattctggcttaccggagactctttgaagaagaaaatgcaacgatcatcacgacttttgatgcgctgatggatcgtctggtgcgcccggaggttttacggggatttttgccccgattgaaggcagaagataccctggatctggaaaaactgcggcagcatctggttggcatgggctatgagagtgcttatcaggtagatgcgccgggacagtttgcggtgcgcggcggtatcgtggatatttttgcattgacggaggaacttccttaccgtattgaactgtggggagatgagatcgattcgatccggacctttgatccggacagccagcgttcggtagacacgctggacgagatcgtggtttatccggcagcggaactggtgctgacgaaggcgcagcaggaagcgggactgaaacagatcacggcagagggaaaacgtctgtcggaacagtaccgcaaggaaatgaaaaccgaggaagcacaccgactggaacaggcagtggaattactgcaggagcaggtggaagaatttggaagtgtacgggcggcagaaagttatctgacctatttctaccaggataccgtaagttttctggaatttgcgtcccgctgtgctgccagacgcgaccagaagcttttgatttttgcggatgaaccggcacggtgtctggaaaaagcggcagcagtagaaaaagaattttccgacagtatgcagcagcgtctggaaaaaggatatattctgccgggacagatggatgtgctgtattctcatgaggcggtaacagcagaaatgcagcggctgggttgtgtgctggtatcggcaatggaactgcgggcaccgggactgacaccgacgcagagctttttcttccaggtgcactctgtcaatgcgtacaacagcagttttgaattactgtcaaaggatctgaataattataaaaaacgcaagtaccgggtgattctgctttgcagttccagaaccagggcagagcgtatggcagatgatctgcggcaggaaggattaaacgcattttttacggaagatacagagcgactggtgcagccgggagaagtcatggtcatgtatggcaaattgaaacgcggatttgaatatccggatatcaaatttgtggtgctgacggagacggatattttcggtgtggagaagaaaaagcgcaaaaagaagaaaatatacgaaggcgagcggatccaaagcttttctgaattgaaaccgggggattatgtcgtacacgaaaatcacggtcttggaattttccgcggtattgagaagatcgaggtcgacaagaccatgcgggattatatgaagatcgagtatgacaaaggcggcaatctgtatgtgctggcaacgcagctggatctgatccagaaatatgcgggttccgatgcgaaaaaaccgaaactgaaccgtctgggcggacaggaatggacgaaaacccgtcaccgggtacagacagcagtgcgacagatcgcacaggaactggtggaactgtatgcggtgcgccagagcaaggaaggttttgagtatggaccggataccgtatggcagcgggaatttgaggaaatgtttccatatgaggagaccgacgatcagcgccttgccattgaagcaacgaaagcggatatggaaagcaagaagatcatggatcggctgatctgtggagatgtcggctttggcaagactgaggtggcaatccgggcagcgttcaaagcggtgcaggagaataaacaggttatttatctggtaccgactacgattctggcgcagcagcattacaacacgtttgcacagcgtatgaaagatttcccaattaatgtggaactgctctgccgtttccggacaccaaagcagcagaaagcggcaatcgaaggtttgaaaaaaggaacggtggatatcgtgatcggaacacatcgtgtcctttccaaagatgtggtctgcaaggatctgggtctgctgatcattgacgaggaacagcggtttggtgtcggtcataaggaaaagattaaacagatgaaaaaggacgtggacgtgctgactctgaccgcgacaccgattccgcgaactctgcatatgagcctgatcggaatccgggacatgagtgtgctggaagagccgccgcatgaccgtatgccgatccagacttacgtcatggagtacgatgaggagatgatccgggaagctattgagcgcgagatggcgcgggatggtcaggtgtattatgtatacaaccgtgtcaaccagatcgcggaggtagcggcaaagatttccgagctggtaccggatgcggaggttgcctacgcccacggtcagatgagtgagcgggaattggagcgtgtcatgtatggctttatcaacggtgaggtggatgtgcttgtttccacaactatcattgagacggggctggatatcggaaacgtcaatacaatgatcattcacgatgcggataacttagggctttcccagttgtatcagctgcgcggacgaatcggacgttccaaccggacggcgtatgcatttttgatgtaccgcagaaacaagatgctgaaagaagtggcagagaagcgtctctctgcgatccgggagttttcggatctgggaagcggcttcaagatcgccatgaaggatctggagatccgcggtgccggaaacctgctgggagaacagcagcacggtcatatggaagcggttggttacgatctgtattgcaaaatgctgaacgaagcggtaaaaagtgcaaaaggcgaaacggtggaggaatctttcgatacttccattgatatcgaactggatgcctatattccaaacggctatattgcgaatgagtatcagaaactggatatttacaagcggatcgcggcgatcgaaaatgaagaagaaaaagatgagatgttagatgagctgatcgatcgtttcggagaaccgccgcggtcggtacagaatctgctgaccgttgcacagatcaaagcagatgcgcatcgggtttatctggtggagatcaaggaaaatgcggcaggaatcacgttccgtatgtttgaacgggcaaaattgaatgtggcaaacctgccattgttgttggacaaaaataaaccactgctgtcgtttatcccggataaaaaagaaccgtgtctgtattatcggaagcagaaaaatagtccggatacgctgacggtgatccgaaccgtgttgacggattgtgcggaactgttgctggagaaaaatgaggcataggcaggatttgcatttgtatacatgggttgcgcgagtttaggatagaaaaaatcttgcagtggcgcggattctgggttatactaggacagataatagatgaaaaaatttcactttacgatataatgagcgcaagagagtcaacatactggtatgattgacgaacggcgaaatcggatcatgaactgcttttgttcatgacatatgatagttggaggaaaccatgaagtttaagaaatttgcagcagttattttaatgagtgtcatgatcggatcgatgtcattaagtggctgtggaattaataaaaatgcaactgctgtcaccatgacaggggatgccattgacacgatcgaagtagatatgggatatgctaattttgcagcacgtgtccagcaggcatcttatgacagcatttttgcttcttattatggagaggattactggaccaatgagtcttatgcacaggatggaaagaatatgcaggagtccatcaaagacagtgttatggagaacattgagacacagtgtctgttagaagcacatatggatgattatggtgtagagatcacggatgatgagaaagcagcaatgaaagaagctgctgagaaatttatgtccgataatacaaaatccgcactgaaagaagttggcgctactgaggagtatgtagagcgttatctgtatttacagactgtacagcagaaaatgagcacagcgatccgcgcaacagcagataccgaagtatctgatgaagaggctgcacagagaacgttcagttatgtaaagatcagtctgacgacttacaccgatgacagcggaaatcagcagacctatacagaagatcaggtaaccgttgtgaaaaaagatgcttatgatgcagcagagaaggcaaagacagattttgacggaactgcttctgattatggctataccgtacagacttattcctatggaagtgatgaaaagagtgagtccgatggcggtttctgtgatgccgttatcacagctgcaaacagcatgaaagaaggcgatgtatccgatctgatcgagggaacagactgctattacatcatccgtcttgacagcgaatttgattcagatgctacggagaagaagaaacagagtatcatttctgaccgtcaggatgaggcttacaacaatgccgtagagagctataaaaaagatattgatattaatgtaaatgacaaagaatggtcaaaagttgcttttgacaatctgtttaccacaccgtctgcttccgacagcagcagtgcaacagcagagtagaacgaggaaaaatacaaagcggacagaacagtccgcttttgtttagcgcatgagaaagtataagttgagaaatgaatagagataatattgttttgatcggtatgccgggtgttggaaaaagtacggttggtgtcgtactggcaaaagctcttggatatcagtttgtggatgcagatctgctgatccaggaagcagaaggaaaattgttgagtgagcttattgaggaacacggtaccgacggatttatagagatagagaacagagtgaacagtcagattcagacacatcgcagtgtaattgctaccggcggaagtgtggtttatggaaaagaagcgatggaacatctgaaatccatcggaacagtagtatatctgaaacagaatctgcgcgtgttacagcgccgcctgcgtaacctcaagggacgtggtgttgtattaaaagagggacagactctggttgatctttataaagaaagaaccgttctgtatgaaaaatatgcagatatcaccgttgatcagtataaacagagcatcgagcagacactgaaggctgttcgaaaagcgctggaggaaaattaggaaccgagacggcggtatttgaataaaataaagcaaagattcttttatatacctatcgggtatgttataatagaatcgctttactaattaaatatgaatgaaatgaaaaaacttgacaaatttttagagatatagttataatagcgtgtttaaatttagaaacatagaggtgcaagatggatcaatatgtaattaaaggaggcagtccgttagtcggtgaagtggcgatcggtggtgcgaagaatgcggcactggcgattcttgcggcagcagtcatgacggatgagaccgttacaatagataatttaccaaatgtccgtgatatcaatgttatgcttcaggcaatcgagaatattggtgcaactgtggagcgtgttgacatccacaccgtaaagatcaacggatcaacgattcacgataccagcgtggataatgaatacatcagaaaaattcgtgcgtcctactatctgttaggcgcattacttggcaaatacaaagatgcagaagttgcccttccgggtggctgtgatatcggaagcagaccgatcgacctgcatttaaaaggcttccgtgccatgggcgcagaagtggatattcgtcgtggactggttgcggcaaaggcagagcacctttgcggtacacatatttatatggataaagtttccgttggtgccaccatcaatatcatgatggcagcagctatggcagagggcaagaccaccattgaaaatgcagcaaaagagccgcatgtcgttgacgtggcaaacttcttaaaccgtatgggagccaatatccgtggcgccggaacagacgtcatccgtatttccggtgtagagaaactgcacaagacggaatattctatcattccggatcagattgaggcaggtacatttatgttcgcggcagcagcgacacatggtgatgtcacagtaaagaacgtaattccgaagcatctggaggcgaccagtgcaaaactgatcgaggtcggatgtgagattcaggaatttgacgatgcagtccgtgtcattgcaaacaaaccgttacaccatacacaggtaaccacattaccgtatccgggattcccgacagatatgcagccacagatgggtgttgttctggcactttctgagggaacaagtacgatcaccgagagtatttttgagaatcgtttcaaatatgtagatgaacttgaaaaaatgggtgccaatattaaggtggaaggcaacattgcgatcatcaacggcgtagagcgttatacaggcgcaagagtcagtgcaccggatcttcgtgcaggtgcggcactggtaattgcaggtctggcagcagatggcattaccattgtggatgatatctattatattgagcgtggatatgaggcttttgatgagaaattcagaggcattggtggtatgatgcagaaggtaagttctgagaaagagattcagcagttcagactgaaactttagaatgtaatgtgtggtgattctgagaaaataagctggcttatgttgatcagagtcatgcaggaaatcttgccggagttcaactgaaaggaagtttggaacaggcatcgataaaattttaacaggaagcgggtagaagcaacaaatctacccgcattttttcggttttttgttatttgtgcaacattttcggggaaatctgttggttgacttttcctatattggaatgtatgatacataaagtatgactgcaataaacgtgaactgtgggagttcacatgtttcaaattagattagaatgagagaaaagaacggaggataattatggaaaaattattatttacttctgagtcagttacagagggacatccggataaagtctgcgatgccgtatctgatgcaattctggatgcctgcatggcacaggatccgatgagccgtgttgcatgcgagacagctgcttgtacaggttttgtattagtaacaggtgagatcactacaaaagcacagcttgatatcccgtctatcgttcgtcagactgtaaacgagattggttacaatgacgcaaagacaggttttgatggaaatacatgtgcagttatggttgctctggatcagcagtctgctgatatcgctatgggtgttgataaagcacttgaggctaaagagggtgagctgacagatgatcttgatacaggtgctggtgatcagggtatgatgtttggttacgctacaaacgagacaccggaattaatgccgtacccaatctcccttgctcacaaaatggctcttcagcttacaaaagttcgtaaagacggtacattaagctacttaagaccagacggaaaaactcaggtttccgtagagtatgatgagaacggtgctcctaagagattagaggctgtagttctttctacacagcatgatgatgatgttactcaggagcagatccatgaggatatcaaaaaatacgtattcgatccgatccttccggcagagctgatcgatgatgagacaaaattcttcatcaacccgacaggacgttttgtaatcggtggacctcacggtgatgcaggtctgacaggacgtaagatcatcgttgatacttacggtggaatggctcgtcacggcggcggagctttctccggaaaagactgcacaaaagtagaccgttctgcagcatatgcagcgcgttacgttgcaaagaacatcgttgcagcaggtctggctgacaaatgcgagatccagctttcttacgcaatcggtgtagcacagccgacatctatcatggtagatacattcggaacaggcaaactgtctgatgagaaactggttgagatcgttcgtgagaacttcgaccttcgtccggctggaatcatcaaaatgcttgacttaagaagaccgatctacaaagcaacagccgcttacggacactttggacgtacagatgtagatcttccttgggaagcaactgataaagttgacgtattaaaaaaatatctgtaattctttgaagtaagaaaaacagttacataaagcgcgtgaaaatcgtcggatatttccatagaagttgtggtaagtatccgacgatttttttgtaaaagcaggagtgatttttcggcttctttttaaaatttaaagattcaagtcgaacgcacgtgagacttggtgcgtgattctggtcagcgcaagctgacatcttcttttcagaa

SEQ ID NO: 13477 - DNA, 296 bp, Unknown
  gut microbiota DNA sequence
cagatattttaaaaattgtgaaataaaacttattgtatttcggatatttgataaagacagatcagatatcccgaccaaatattttgcgtataattgtaaataccaacgattttctttttcgtaaatattaataaatgaaaggcttttaacaggtgaactggcattgattctcgatttatcaaactgaaacctatccatataccagatacacgctcgccaatttatctctggatctgttagaaataacgttcttctcgcaaactcaacaatcttagaagcctgtttttttataattt

SEQ ID NO: 13478 - DNA, 208 bp, Unknown
  gut microbiota DNA sequence
accagggagccgcatgaacatttcgttctgttggctggattataaagaaaagaatcctgatggttatgagaagtcacagttttacgaatacttcaaccgattcatagcagaaaactatggtggccagaaggtatccatggccgtaaaccgaatcccgggtgaaaagatgtatatcgactgggtcggtgatcagccggaactgttaaca

SEQ ID NO: 13479 - DNA, 146 bp, Unknown
  gut microbiota DNA sequence
ttatcttatcaattatatccctaaaaatcaatttaaaacataaagaaatcaaaaaatgctttattgatattcctttaaaagtcaaagaagtcaaaaacgtaattgacattttgatatctttgtgtataatgtaaatcaagaagtca

SEQ ID NO: 13480 - DNA, 7619 bp, Unknown
  gut microbiota DNA sequence
caagatgcgcattcatgcctgcgtccagacattgcttcacatcttcgtcataagcgttcgctgtcatggcaataattggcattgtttttgcatcctcccgatccagttcccgtatccttcgagtcgccgtcagaccgtccatgaccggcatcatcacatccatcaaaatcacatcaaaggttcccggcggttcactgacaaaccgatccaccgcctgctgtccgtccgctacgaccattacctgcgcgccctgatcctctagcaacatttctgcaatctccacattcaactcattatcttccaccagaagcagccgacatcccgcgatgctcgccgactcaacaatctcctcactttcctgttgctgctgttcctgcgactgctctgttgccagtcgaaatggcagcgtgatcacaaaggtggaacccacgccttcttcgcttttcacctcaatggtcccgttcattttatccaccagattttttacaattgccatgccaagccctgtaccattatacacacttctggcatccgaccgctcctgtgcaaaaggatcaaaaatgtgtcggataaattcctgactcattcccacaccggtatcctgaatcgtccactgatacgttacaatctcctgatcaacccccagacatttacagctcgtctgcacttttccgcccaaccggttatatttgatgcagtttccataaatattcaggaaaatctgacgcacatgcaacggacttccgtaaatattttgaaatgccacccgctcggtagatttatcatattccagcgttacaccggcttccgctgcacgctgctccacaatcgtcaatatatcgtccgacagggttttcaaattcatcggttcctccgacagcacaacttctccgctttccaacttactcatctgcagaatatcgttgatcagggacagtaaatgattggcagagattttcatttttttctgattttcccgcagcagctttgtattctccggatgtgcctctccaatttccagcaagccgatgatcccgtttaacggtgtgcgaatatcatgactcatccgggacagaaaacttgtctttgccacatttgcccgatctgcctgatcgactgcctgctttaactgctcatttttactttgcagctgttcattatactgccgctgaatgcttaattgcttctctctgtaattttgtgccattttccagcgcaccatatgaataattaccagaatgatcacgtatacgatgatggaaaacatcacacttggaatcgtactgtcaaacacatcgctctccggcagataggcatacacataataatcccgcccatgctccatcagaccataattgtgggaaagtgcagccgtatcacctcttgcatggatcaatttatcacttgctgccgcttctttgattttccgcaaaatttccacgtcatcggtactttttccaatcaaagtctcattattggacgctatgatttcctttccgctgctcaccacgattgttccatcctgttccagattataacccaccaacaacgtatccaccgacagatggaatgcccgtgtatattctaacgtcgtgtgatagtaagcgacaaccatcccactgccatctgcatttcccgtagctgccagatctgcataagaaccgtcttcacagtgaaatcgcatagcatacgttttttccgaaaaaagaatcgcatcctgcagagcatccgatgtcatatgctccgataattcttctgtcgacaacccatcaaccggatctccatactgtacctgtacctttccgttttcatccagaagcaatacacccgttacataactgtcccgcgcccattgctccagcatttccgttgtcactgctccggcatcggttccattttctgtcaatgcatgattgatctggtgcacactttcgatgatacgcatcatacttttcgtctccgatgctaaatttaaccgctcatactgattacattgctccttaatataactgactgtgctggtcaacgtccgcttcgcgcttctgacatccacatgtactgcgatcaaaaatacgcctcccatcaggataacaccaagcagcacttccaatgtatacaacaatcgattacttttatttttcacaggtatccacctccagataatcctccggatgttccagataatttccaagaatttcctctaatgttccatcctcacgcatatcttcaaatacctgtgacagctctgcctcaatgcctctgtcatcgtactttgaaaatgcaacgccaagccccaccgtctgcaatggttcttccaggattcgatattctaagtcataatccttcatacactgtaaaattgcggtttcatgagcggctaccgcatccgcataccctttacttaagaaaggatagatcaattcccgattctgcaacgaaaatatttctgccagctcaggaatccgttcatccgtatgtgacgcaaaaatctcctccggctttgtcgtagactgtactgctacccgttttccttccagatctgcaagggtatagatatcactgtctttactgactgccactacctgacgactgatcatatagggtgtcgtccagtggtactgattttctctgccatcaatagaaaaacttccccagatgcagtcaatgtctccgttttccagaaactgcttttttgcttcccagtcaatatatgtaaataccgcatcataacctaaccggtcaaatgcctccgttgcaagatccacatcaattcctgccggttttccgtctgcatcttcataattaaagggcggataattgtcgctgccaatgatcatctgtggacgcgtctctgtctgatccgtcatctgtttctcctgccctgcgcatccactgatgcaaaatagcagaccggtacagacaccaatcgttaaaatccgcctgaaactgttccgttttttcattcgtcaccacacctcttatctaactgttttattcggtaatcattcaatttgcgaatattgtaacagtttgtcgatgcggattttgtcggaaaatgtcgattatacgcggggactgtgggtaaattttagtttataaaacgaaatcgaaacatccaacaaccatatcatataagatcacacatacctgtactcgttatagttagtatgttttaccttcccgtgtgcacaacaaataatttagatttattcctgtctgaatgtgcacatgacacgcagcgcagtcataatgtaaaatttgttcaagtcgaacgcacgtgagacttggtgcgtgattctggtcagcgcaagctgacatcttcttttcagaatcactgcactctacactccgttccggtcggcgcaaaaccattgtctcccagacaatgtgcgccctcgcggagcatttatctcagtcggagattgaactcccactgagaaatacttgttactactcaccacttgcagaagtgggagtctcaactcagactgagatgaatcgaaaacgtaaatgcgccccaaattgattttttcttgatgagcgattgttagccagaaagacaaaatcaattggggcgccttcatttatttaattttacataaaaacaagctagtcgcggaagaacgctacaccggattcgaagatcttcagatcctgctcgccgtaaatgttgattgcaacaccatcaccacgacgctcagagtgagccatcttaccaagtacacgtccatctgggcttgtgataccctcgatagccatgtaggaaccgttgacattccactcttcatccatagttggatttcctgcttcgttgacatagcatgttgccacctgaccatttgtaaagagtttctgcagccactcatcgtttgctacgaaacgtccctcaccatgggaagccgggttagtataaatctttccaacctctgcctgtgccagccacggagatttattggacattacttttgtataaaccatcttggaaatatgacgtccgatggtattgtatgtcagtgtcggagaatctgctttctgctcacagatctcaccataaggaaccagaccaagtttgatcagtgcctggaatccattacagataccaaggcagagtccgtcacgctcatttaagagtttttctacggattctttgatctttgcgttacggaatgcagttgcaaagaattttgcacttccctccggctcatcacctgcggagaatccacccgggaacatgatgatctgtgcctgatcgatggcttttgcaaatacatcgacagaatcacgaatatcctgtgcgttcaggttcttgaatactttggtcactacatttgcacctgcgcgttcaaatgcttttgcagaatcgtactcacagtttgtacccgggaataccggaataaatacggtcggttttgcaattttatttttgcatacataaatttcttttgttgtataaagttttgcatccagctcttttttatctgtggttgctctggtcggatatactttttccagtgtgtttgtccatgcggataatgcgtcatccatagcaatttccacatcaccgtaacggaaaaccggctcttccagaacggaaccaacgatggatacgtttgcacgaagtccaactgcttctaatgcttcttttactgcatcggtatcttccggtgcaacttctgctaccagattaccaaatcccggtgcaaatgcttcttccgatttcaggcagccacgaagagatactcccagtttgttaccgaatgccattttgctgactgctgccaccagaccttttgcatccagtgcgtaaacagctttcagtttcttatcctgaatcagagcatatactgcatcatacagtttcataacctgctcataatccggcagatcatatgcatcatgatcaatggtaaagtacatcagtttgtcgcctgctgtctttaactccggtgtcacgatatcctgctcttttgcaacgtctactgcaaaggaaaccagtgtcggcggtacatcgatatcattgaaggttccggacatggaatcttttccaccgatggacggcagaccaaagctcatctgtgcctgatatgcaccaagtaatgctgcaaacggctggctccagcgtttcggatcctcgctcattctgcggaagtactcctggaatgtgaaacggatcttcttgtaatcaccaccggctgccacgatttttgaaatagactccagaactgcgtaaacagaaccatgatatgggctccagcttgacagatacggatcaaatccataactcatcatagtaacggcatcgcattttcctgtcataaccgggatttttgcaaccatactctgagtctcagttaactgatattttccaccatatggcatgtatacacttcctgctccgatggaaccgtcaaacatttccaccagacctttctgggagcatacgtttaagtcttttaaggtatctacccatgcagcttttacatcgttgtttgccagatctttggcaacactgtcaagggcgatcttgttcaaatagttgtcagccttgcttgggatctccacctgaacacctgtctcctgatgtgcaccgtttgtattcaggaatgcacgggagatatttacgatttctttgcctctccagatcagaaccagacgcggatcctcagtaacaaccgctaccggaacagcctctaagttttcctctgctgcataagcaaggaactgatctacattttccggtgcgatgacaacagccatacgctcctgggactcagaaatagaaatctctgtgccatccagaccggcatattttttcggaactttatctaattcaacacgcagaccgtctgccagctcaccgatggcaacggaaacaccgcctgcaccaaaatcgttacattttttgatgatgtggctgacttcctctctgcggaataatctctgtactttacgctctgtcggcgggttacctttctgaacctcagcaccacaggtatcgatagaagatgtggtatgtgctttggaagaaccggttgctccaccacagccgtcacgtccggtacgaccgccaagcaggatgatgacatcgtccggatcagaagtcagacgctgtacagcacgtctcggagctgcaccaagaacggcaccgatctccatacgttttgccacataattcggatgatatacctctttgacaaaaccggttgccagaccgatctggttaccgtaggagctgtatcctgctgctgcggaacgaacgatcttcttctgcggaagttttccttctaatgtatcttttacagaaaccgtcggatcagcggcacctgtgatacgcatagcttggtaaacataagtacgtccggacagcggatcacggattgctccaccaagacaggttgcagcgccaccaaacggctcgatctctgtcggatggttgtgtgtctcgtttttgaagtttaccagccactcctctgtcttgccgtccacttccaacggaacaacaatactgcaggcattgatctcatcggactcctcctgatcagccagttttccttcttttttcagttttttcatagccatcagggcaagatccatcaggcatacaaatttatcgtcacgatctttgtaaagttctgcataagtctctttgtagttatcataggaagctttgatcggctccagataatcgccatcctcaaatacaacatcctttaactctgtggagaatgtggtatgacggcagtgatcagaccagtatgtatcaagtacacggatctctgtcatagtcggattgcggtgctcatcttttacaaaataattctgaatgtgctggaaatccttgaatgtcatagccagattcagggattcatataatgctttcagctctgcttccggcatctcgcagaaaccgtcaaatacgataacatctgccggctcgtcaaaattctgaaccagtgtctccggtttttcaaaacccgtctctctggaatccaccgggttgatgcagtgatgtttgatggcctctaactgctcctctgtcacatcaccttcaatcacataagttgttgcggtacggatgaccggttcctcattctcattcagaagttttacacactgaacagcggaatctgctcgctgatcgaactgaccaggtaaaaattccacgctgaatgcttttgctcccttcagatcaaaagtctcttcataaatatcatcaacaggcggctcggagaaaacactgaccagtgctctctgataagttgcctcagaaatgttttccacatcataacggatcagaacacgtactcctgtgacggaagtaattccaagatagctcttgatttcttcctgcagttcttttgcttttactgcatacgcttcttttttctctacatagactctgcgtacattactcatatcggatcctccattttaaaattaatccaaacttcttttgtaaagtctgctgtgggatgggcttctgtaaagcggatatatgccattgtccatctccgcattattgcatagcacagacctgttccgtgctatcatgatacccttagtataacgtactcacttcaattagagaaattaatatatttaattctatatataagttt

SEQ ID NO: 13481 - DNA, 936 bp, Unknown
  gut microbiota DNA sequence
acaaagtatttttttacgtagcacagtccttaagtttttcggaggccagcaaacacctgtacatttctcagtctgcggtcagccagtctattaagacactggagcgaaaacttggacagccgctttttatccgaagtacgaaaaaggtgcagctcactcctgccggacagttgctgttaaagcatattgaaccggcaatgaacctgatccgccgcggcgaaaatcagctgtttgacagtcagggacttgggctcggacagcttcacattggtgccagcgatacgatctgccgctatttcctggttccgtatttccggaaatttcatcagcagtatccgaatgtaccgatcaaagttacaaatgctacttctctgaactgtgtggatctgctggaacagggaaaagtggatctgatcattacaaatgctccaaatactcggttgaatcagtcttacatccgaaaaacagtttgtgaatttcgggatgtgtttgtggcaaatccggcttattttccgatgaagtccaaagtactgcggctggcagaactttccggttatccactgatcacactggagcgtcattgtactacctgcgaatttctgcacaatctgtttttacaacatcagttggaacttgtgccggaaatcgaactttccagtaatgatctgctgattgattttgcaagaattggattgggcatcgcctgtgtgccggattattgtgtccgggaaaacaatgaagatcttgaaatcattgagacgaaagagacaatgccggcaagacagatcgtggcttcggtgaatccgacgctgccgatcaatgcaccaacagaagcttttctggacttgctaccatctctgtaacttcttgtttgtcttttaaggaacaagatggaaaaactccaatgcaggcacgccggatttcctatcttcgctg

SEQ ID NO: 13482 - DNA, 209 bp, Unknown
  gut microbiota DNA sequence
ctgggaaaatgacggaagccatttatctcgaagtgactgagaagacagaagctgccaaaaaggctggacgccaggtttccgtctccggaatgttgaaatttttaggtgtctctcgctcaggatatcttgcatggcttcaccacgtaccttctgatacagaaaaacgtcgtgaagccgtaaaagcaaaaatacaggatatttatgatgat

SEQ ID NO: 13483 - DNA, 14806 bp, Unknown
  gut microbiota DNA sequence
cagatcgtccagctccggttttgacagattgcctgccggcagatcggtaacgatctcatcaaatttataatcatgcacaaaatcaaaataatcgcgattgatataattggtctgcataccggcaatcttgctgtttactcgcgctttctcgatcgcctcgccaaaagtatcaattccgtaagcatttcgcgccggtaccgcaaatctgcgttccattaacaaagtacccacaccacagaacggatctaagatctgcgcatactctttcagatatggttttgccagtgccatcaatcctgctgccatcattggtttcatgcttgctgccacataatatctgcgataatcaaaacgatgatccggcagtgtatacagttttaataacggtacaaatccgccctcacgatgctgtaacaggcgcaattccacttcataatgcgaagtagagttgatcaggtttcgctcaaaagctccttctatcgctgttgccatacgttttgaaaaaatgcttcgctcttctaacgacatggcaccggatactccgatcctgaagcaaaatgggacatcacctttgtgtgtctctgctaaaatctgcatcagatcggattctgccagctgcgctgccagtgtttccggatctgcggaaagcacgttaccctctgtctgcgtgtgaatcacaaacagtaattcctgaattgtacggattttcatgactgtttcaaaatcaggcacaatggtacgcacaccggattttaatacttttttctttccagtcacttcttctgccagtgcatcacgaaatgccggaatggtcaaaagcagtacctcgctggaacggttccatccattaaaggtatgttttttcacaccttttttctgcaataaaagttcctgcagcgcacggatctctgcctgcacatgtttcttttcttcttccggcgcatcataagcaaccagctcctgcagacgcacctctaactgtggcagatactcgctgcagtcgatcatggataatgcctgcacataggcttctttgacaaataatttatcttcttcctcataggcatccatcagtacatccagcgcatcctgacaatgcaattctccaaggatcaatgctgcatttttccgtaccttcggatcctgatccaccagacacttcatgatctcatccagacggttgcctgtcatggtgagaaacacctttttctttgcgtcatccttcagttcttttttcagagcgatcagacttgctctgcgatcgattcctttttttattttttcataaagatctctcatccgttttcatctcccgtcttgtaaacttgcagataagtatctacatcttttttaaactgcgcccacgcatcttcatgttccacataatagagcggacacagttttccagttacatcataatgccggatcacatcttccgatgtcagtccaaattttgcacagagccatgcggtcagtttgatcaccgaatcatacgttgcctgttcaaaagaaccgtcctcgtttttataacaacactcgatagaaatcgtatcgctgttgcggtcattggatgcataggcaatctccgcagttggaatacactgcacaatctcaccttccagtcccacgacaaaatgagaacttgcctttgtcgtatgcgtatctttcagattttcaaaataattgcggtttgcaatggcagttgcgccggggtttgccgtatagtgaatgacaatgccatttactttttccagcgctgtgcccggtctggaatatggattgaccgtcaaaagttccacgtccagttccggtctgttttcatccacttcggacaaggttaccggactgtctgcactgaccgctttgtttttctgatgtctggtcacacccacgatcaccagcaataccaacgccagtaatcccagtgccatccatacccttgacatatcgtatctttttcgtctgcttttccgcttcttttttcttcgcggtgcgtttttttgtaccttcttctgtgctgccatatgttttgatttccttcgactctatatcaaacaatttttgcttattgtgaaatagcacgatcccttttttcaaatacaattcaaaatatcatgaacaaaaaaagttcatgatcaacattttgccaatcataccaatatattgacttgtttgcgctcattgtatcatacatattacttgttttttgtaaaataggttctggcaagttccagtgtctgcgctaactgctcctctgtatgcgccatggaaataaatactgcctcaaactgcgccggagccagataaatgccatggttctgcatgtaattacagtaatcagcatatgccttcgtatctgaagtctgtgcgctttcatagtcaacaacttccctgtctgtaaaaaacaggcttcccagtgaagcaatatgattgacatgatagcctctgccattctcatccacaattttctgcagttcttcgaaaaaccggtcagacttctgattcagggcatcgtacgcttccggatgtttttttaaataagaaagctgtgcaatacctgctgccattgccaccggattaccgctcaaggttcctgcctgatacacagcgcccaccggagataccatttccatgatttctctgcgtccgccatatgcgccaactggcatacctgcgccgatgatttttccaaatgtggtcagatccggtgtcacgccaaaatagccctgtgcaccgtctgcctgcatacgaaatccggtaatgacttcgtcaaagatcagcaatgtgccatatttgtcacaaatatcacgaagtccctgcaaaaatcccggctttggcggtacggttcccatatttgcaccaaccggctctaccagaatcgctgcgatctgttctccataggtgtcaaagcaattctgcacgctctccagagagttataatctgcggcgatcgtatctgcggtgcagcctgccggaacaccaagggaacccggaacgcccgcggtcataacgccggaacctgcctttaccagcaacgcatccgaatgaccatgatagcagccattgaatttaataattttatctctgcgtgtaaaaccgcgcgccacacgaacagcactcatcactgcctcggtgccggaatttaccatacgcaccatttcgatggacggcaccatgctacagatcagttttgccatatccacttctatagatgtcgctgctccatagcttaaaccgcgttttgcatactccatcaccgcatccaaaaccagcggatgattatgtcctaagatcatcggtccccaggaaccgataaaatctatgtactcgttgccgtcctcatcccacatcagcgctttgtccgcttttttgataaaacgcggggtagaaccgatagaaccaaaggcacgaaccggtgaattcacgccacccggaatgtattgaactgcttcctgaaaaagagcttctgattttttgatctccattatccgattctcccttcatccatgcattttgccagttcttctgcaaaataggtaatgtaaatatctgttcccgcgcggtaagcagcgactgccatctcacacatgatagaagtctcatcgataaatcccgccgctgcggtggtttttaccatggaatactctccgctgacgctgtatgctgccaccggaagatctgttatatcttttacttcgcgaatcagatcgccgtaagccatagcaggtttcaccattacaatgtctgcgccctcgatgacatcctgttctacttcttttaacgcttctctgcggttgtgataatccatctgataagttttgcggtcaccaaaagccggtgcggaatctgccgcatcccggaacggaccataaaaagcagacgcaaattttgcagaatatgccatgatcggtgtattgatataaccgttggcatccaaaatgtgacggatcgcgccgactctgccatccatcatatcagaaggtgctaccatatctgcaccagcctgaacctgggataaagccgttttctgtaacagttccaatgttttgtcattatctacatcatgtccgcaaagtacaccacaatgaccatgagaagtatactcacacatgcagacatctccgatcatatacagatccgggaacagttcttttgccttacgaaatccctgctgcacaatgccatcctgcgcataggcaccgcttccaagctcatccttgtgattcgggattccaaagagcatcacgccaccgattccggcttttgtcagttcttctaatttttcacccatgcggtccacactgtaacggtactgtcccatcatggacgggatttcttctttgatattggttccttctacaataaacatcggatagatcagagaggatttatccattctggtctcccgtaccatttttcttaaatttgcgcttgtccgcaatctgcgcggacgattgatcatttccatttttactttcctcctgcagtctatgttcgaccgcttttctctcaacatttttatcattttcccataaaaatgcaggaacgaattttatataaaaagttataatactttattttccatcagactgagatgaacaatttaaaattgtctgtaccagatcttcaacggttgccgatttcgcggtcacacaggaaatccctgctttttttgcttcctgcgcggtctgttttccgatacagatgccctgcacatgactcagatccgtatccggtacattttttacaaagccccgaaccgtagatgcactggtaaaaactaccatgcagccttcttccaccagcttcggtacattcacccatttctgctctttctctatggtatcataaatcggcaaatctgcaatcgtaacttttttccttttctgaatctcccggatcagttcctgactgccgtttctcacccgcggaatcaaaatatgattgccgtctgcacaggcttccccaatgcagatgccaagatgtgccgcatcgtacacctctggaaccagatctgcaaaaacaccatgcagttccagttcttttgctgtacccgctcccaaagctgcgatttttgctctgaaaaatcttcggatatcgattttttctttttttaactgatcaaaaaagcaatttacaccagacggagaggtaaataccacatattgataatcatttaacagtacatcagacaacttctgagtcatgtctatatgcatctctgccttttggttctcattttgtgtctcggtatcttcaacatttttctgtatccatttttctgttatatcacattcattcgaaaaattatcattgggatgaatctcaatggtcggcagttccagcacttctgccccaaggctccgtaaccgttctgccagcgcccggcttcgctcccgcggtcttgtaacaataatttttttaccgaacagtgttagtttttcataccagttaaattcatctgagagtccacagacttctcccacaacgatgactgccggtgtttccattggattttttttcacttcttccggcagtttttccagtgtactcacgatccgtctctgttttgctgtcgttccccggcttaataatgccgccggtgtttctttcgcttttccgccgttgcataatccctgacaaatatctgtcaatgcggaaacgcccatcagaaataccagtgttccttccagttttgccagcgtggtaaaatccagattcagcggttcgtcttttttcttatgtccggtaatgatatgcacactggacgcataatctcgatgcgtcaccggaatgccgttgtaagccggtacagaaatggcagaggtcacccccggtactacttcgaatggaatgttgtgttttgccagcaactccagttcttcgccgccgcgtccaaacaggaacggatctccaccttttaagcgcaccacgcattttccttcctgcgcttttttcaaaagcagctcattcatctgctcctgcggcatggtatgattaccggaacgttttccggcatcgattttttctgctgcttccggcatcatcagcaggatactctctcccaccagccggtcatacacgacgacttctgcctgttccagcacacgctttgcttttaacgtcaaaagttccgcatcggaaggtccggcgcccaccagccagacttttccttcttttttctgttccatttagcgctcctcctgtgcttttccttctgcctgcaaacgacgtgccagatttctgccaaaattttctgccagattacatgcatttggtttaaaaacaacttttttgtgatctgtacaatctgtaggatctatagaatctgacaaatctttctgaagcagattttcttttgccagataaataaattccgtttcgatgacacttttcccggtagcttccacataataaagtcctcgcagcgtcagttttccatcctccgcaatcgttgcatgcgctgccaccggagaggaacatcctccgtccagttcccggataaatgcccgttcacaaagggacgtgatccggcttgcttcggaacaaaatagttgtaaaaatgcataattttcaccgatacgtccctgtaacgccaacacgccctgtccggcagccggaatcatttcttctaccgaaaaatatcgggtaatcctgttttccaatcccagtcgttttaatcctgctgctgccagaatcgttgcagagaactccccggaatccagttttgccagacgtgtctgtacatttccacgaatcggtgcaaaggttgcctgtggatacaatttctgaaactgcaacatccggcgctgactcgaacatcccaccggtttggaaaaatccagctctttcacaccgtctggcaataccagtacatcccgcggatcttcccgcttggaaaacccgatcagcggcaattcagtcggaatttctgccggcatatctttcagactgtgtaccgacagatcactgcgcccatccagcaatgccgcatccagttctttcacaaacaatccttttccgccaatcttatctaatgtacgatccaaaattttatcaccggtagttttcatggtaacaagctccggctcgtattccgggcactgatttctgatataatccatcaccatctcgctttgaatcacagccagacggctctctctgcttccgattcgaaattttttcactgttattcctccacattgttataatctaccgttccaagtatttcccggatttttgcacttacctcacgcacttttccatgatcgttattacaggaattgattcctgccacaatatcatcttcttccaccagcgccggaaaccgaaaatcacacagtgcttggtcggatgctacattcacccagatatgatgctttttacactcttcccagacttccagatccgctttttcgtccccggtcgccgtcagcaccagttcataacctctggtcatgccatgcataaacggactgcggatcagctccagccgctttctgccatacttctgctgtaactgtaaaaactccatccgaatctccgatgcagtcaccgttacatccgcgccaaaccgcagcaggctttctgttctgcgcagggcaatatttcctgctcccacctgcaatacttttttccctgtaatatctacaaaaaatggaaaatatctgtgatccatccctttttctactcctttttactcctctttccatactttttccaatgcagccagacattccctcatcacgtccgtatctgcatgatcccgcaatccaaacaacatcttctgaaatactttctgcgatgtctgttccacggcatctgccagctgtcgacactgactggcatccaatttcatctgctgaaacgttcttcccatccgccagcttacatcctgcgctgccagtgcaccaaacttttgaatctgcggcaccatatcccgacattcataccaggaaacaaatgctgccagttcttcttctgccagcaggtttgccgcctgtaactgctcctgctgccgctcagacaaaccgatgccaccctgaaaatcatcgatgtcatagacttctgcccatgaaagttcccggattgaggtatcaatgtcccttggcactgccagatccacaaaagtgatcggatgctccagcttccatttttccagttccacacgctctaatgtcacatttgggcttgctgttgccgatactacataccggcattccggaattttgtgatagcgttccccgtaatgaatccgggcacagccttccggaatccgcacttctccgctgtgatactgtcgaaccgttaccgttacatttgcgccccgctcctgaaacgcccgtgccgtcagccgtcccatttcaccatttccgatcacaagacagttttctccggcaaactgatacccctgacgggcaagctgtgtcagtgctgcatcaatcgttgatgtgtttccttttggaattgccacctgtgttttgatctttttgcccgctgtcactgccatacgaaacagtgtttttaacaccgtatccgcaaattcaccacttcgggcaaattccagcgcatcgcctacctgcgtcagaatctgatcttccccgatgattttcgatttcagtcccgcggtcagcaaaaaaagatgccgcaccgcgtcttcttcagttcgcaccgtaaaaagttcccgtagccgtttttcttcttctccggaaatctgtttacagtggcaaataatccggtaaagatccggctctgccttcgcatccagagacacatacagctccatccggttacaggtagacagcaacacgcagccgtccacgctttgctgccggacgactgcctccatcagttctttttgttttgtctttgtaaaggaaaataattcccgttcttccacagatgctctgctgtggtcaattcctatcatctgtatgtttatcatgatttcttcattcctctgctgctgtcaagatcatataataatgcgttgcagattgctgccgccacgttgcttccgccttttctgcctcttgcgatgatataaggcacatcggtttccatgatcagttcctttgcctgcaccacattgacaaaaccgactgggacaccgatgatcagtgccggtgcaagttttccttcttcgatcagttcatacagacggatcagcgctgtcggtgcatttcctatggcaaaaatcagcggtcccggtagggatgctgccttatccatgcttgctgcggagcgggtaaaaccatgttgtcttgccgcctcagctacatcttcatctgagataaaattgcaggcttttccgtacagattttccaatgttcgtttgttaataccggaccacgccatcttcgtatccgtcacgatcgtcgcacctgcccgaagcgcttcctttgccttttccaccgcatgttccgaaaaagtaagggtatctgcatattcaaaatctgccgtcgtatgaatgacacgtttaatgatgtgcgccttgtctgccggcaatgtaattcctttttctgccagctcctgaccgatgatctccatacttctcttttcaatatccattggttttacatgttcaaactccatggtgttctccgctgctcctttttctatcacaattcaagtctcacgtgcgtgcgacttgaactaaatgtatttttatcttaatattcaatgccctctctggcagtaattccgcgttcaaagggatgttttatttttcggacctctgagacataatctgcatatgccagcaattcctctgccggatcacgtccggtcaaaacaacttccagattctgtggacgctgctccagaaacgcaagcagacgcttccgattgatcatttctgcccgatatgccgcacagatttcatccaaaaccagcagaccatatgcttcctctttcgcgcgtcgaagtgcttctgccagataatggtcataatatgccctcgcctgccgctttgtttcctcatccatccgaaaggtaaatccgaattttttttctacagaatatacggtaatctccggaatctgttttaaaatccgaagttctgaggaagtcccatcttttaaaaactgggtaaacagcactttaccgccgtttccggcaaaccgtactgccagtcctaccgccgcggtggtctttcctttcccgtcaccggtataaatatgtacacaactttctgccactttttcgtcctccacatttatatcatcaaacagaccataaagcggacattcgcaatccgctttcgctacttgctcatgaacgcagtcgctttgcaacctgcgttcaaactctgcatacattatctgccctgacaaaatatctactataactatgctgcttttttcgcaatttaccacagaaacttatttcatctgatcacacaccggcatccagaatccggtaaatctgttccatatccagatgtttccgcaaaatatctgccatcttatcgtactgtgtttccttgtatgccgcataatccatctgcgccagtcctgccggatcaatcccttttttctctgccagcgccttcacaatggcattgacgacttcctgcgcatcaaaaataccatgtacataagagccatacacattttcgcctatggcaccctcgcatttttccattgcgctgccgctctgtaacagtgttttggctccgccgtcagcactccctccggaagtatgtcccacatgatcgcaatgatcgctgatttttgtcagcatcgacagctttccatccgaaacactctgtcccatatgaatctcatacccggaaaatgcaatgccggagagtcctgccagatctccttttacctgcaaaaactgcccgttcacccgggttcttgttttttcttccgtaaacaccgtatgcatcggaagcagtcccattccgcgcatggttccgccatcttccacaccgaacggatcggaaagttcttcgccaagcatctgataaccgccacagatgccaaaaatcggacatcctgccgcatgtgcctttaatactgccgcttccataccggactgacgcatccacgccagatcactcatcgtatttttcgtacccggaagcaggatcagatccggatttccaagctgcgccgcccgtttcacataacgcaccgacacacccggaatactctcaaatatattaaaatcggtaaaattggaaatgcgtggcagacgaaccaccacaaggtcaatctgaccaactgctttttcgttactcatccgttcgcttaagctgtcttcatcttccacatcgatatccatatatggcgttacgcccaccactgaccggtggcaaagctcctccagcatcacaatacccggatcaagaatcgtcttgtctcctctaaatttgttgatgatcagacctttaaccagctgtttttcctcttcttccaggagcatcatggttccggcaagctgtgcaaacactccgccgcggtcgatatcgcccactaaaagtaccggcgattttgccatttttgccattcccatatttacgatatcatcacttttcagattaatctctgccggagaacccgcgccttcgattacaatgatatccgactgttcctccagcgtatgataggctttcataatgtccgggatcagtgtctttttatatttaaaataatcccttgcccgcatcgttgcaagcacttcgccgttgacaattacctgagaacccacatcattggtcggtttgagcaggattggattcatcagaacagatggctctattcctgctgcttccgcctgcatcacctgcgcacgtcccatttccagtccttcggaagtaatgtatgaatttaatgccatgttctgggatttaaaaggtgccacccggtagccatcctgtttaaaaatccggcacaagcccgctgccagcagactttttcccacatttgacatggtgccctgtatcataattgattttgccatatattctgtgtccttttcttcaatgcttccaaaaatttctcattttcttcctgtccgcgcactgcgatccggtaatatccttccgtcagaccatcaaaatttccacaatcccggatcagaaaacctgcctcccgcatggctttctccagtccttcttctgcccggaaaaatatataatttgccgcagagccaaacaccttaacaccggctttttgcaaaccttccagtaaatatgctttctgctctgcgatcagtgctctgcttttttccacaaatgcggtctcttttacggcagcgattcctgccgcctgcgccggaactgacacattccatggctgcgatactgcttccatgcgccggatcagtgccacatcactgcaaatgccatacccaagtctgagccctgccatgccatacatttttgtaaatgcacgcaaaatgaaaatctgcggattctctgccacctttgataacagcgtgtgcttttctgcatcttccagaaaatccgaaaaacattcatccatcaaaagacgcgttccctgtctctgacactgaactgcgatttcttccgacaattcctgatccagtaactgcccggtaggattattcggattgcacaagatcagcaaatccggtcgtttcttcaatgcttctaaaatatcccgttgtacacaaaactgatgttccggcagcaacaaatgtgtccgaatctgacacgcaacactttccaacgcctgtcgatattcataaaaagacggaatcggcaataatgcttcttttggcttttctgccagcatcagggtaaaaatcacgtccgcggcaccgtttccacagaagatccactccgctggaactccttctttttcagcgattgcctgctttaatgcctcacaaaacggatccggataatgaacagcatcatcaatggcatcctttgctgcctgacgcaccgcctgtggcattccaagaaaattgatatttgccgaataatcgattttgttttgattgcggtaaatatctccgccatgtctgtgcatccgctcacctcctgaatttccattttttccttattgactatcacttattgagtatcatttgctaccaaaatttcatttactctgacagattcctttgcctattgcaaatgactgtattcattccaaaatacgatcatttacaactccatttttattccaaaccaaactgcaatccttatgccacaaaatacaatcataccaagcagacttgccgcatacagcagcttattcgcccttgcaatgtcttcgatttccactgggcgaacagcatcaccaatggttggtttttcatgtttttttccaaaataccatgcatctcctgcaagctgcacctgcagggcacctgccatcaccgcctccgtctgtgcagagttcggacttgcatgattgagcctgtcccgtttgaaaatcttccatgcagacgcgccgtccaattttaccagcggcgctgcaagaatcatcataatcgctgacagtcttgccgggataaaattcatcacatcgtcaaattttgccgctgccctgccaaaatacagatacttgtcattcttataccccaccatggaatccatggtattgactgctttgtaaaaatagccaagcaccggaccgccgattgccatgtaaaacatcggtgccagaattccgtctgacgtgttttccgctacggtttccacagcggctttcaccacaccggtttctgtcaggttctgtgtatcccgtccgacgatcatggaaacagcttttcttccggcttccagaccatctgtctgcaatacctctgccaccttcatactctctgtctttaacgactttgttgccagaatggtgtagcacatataagactgtaccgcgaacccaagccagaaccagatccgataacaaatcattaaaattaccagcggaatcgcggtagaaaccgccagcacacaaatgacaagcagcacaccgcctgccagctccctatttggttcatgaaatacttctgattcacgttttttatcacaaccatcctttttgctttcattcgtgttggttgtatccagttgtttttgtttctgctcctttttgcttccccggattctttcgtaaagcggacgttcgcaatccgctttcgctacttgctcatgaacgcagtcgctttgcaacctgcgttcaaaaaatgaaatcatatttccgataaagcagatcgggtgccacatcccatggggatcgccaaaaatcagatccagcacatagcccacgatcagagttcccacaattatctctgtcatctgtctatttaatacgggttccgatgccacaggtcacacgatataccgcctctgcctgcgctgccagtgcacaggtcagtcgtccggtgcgctcccgccatgcccggtcaaaggcatccatcggcacaacaccacagccaagctcattgcatacaatgatcgtatccggctcctgtaccagtttttcccgcaactccttttctaacttatcatttttctcatttgaatttacatgttcacttatcttgtcattcgcatccgcctccatatgcgcctttacccacatatgaaactgtggaaaaatacttcctgcttttccgtttttcttctgttcttctaaaagctgttccgcaaacgccatctttccctgatatgcgccgccaataattaaaatcatgcacattctccctgttttatcaaatacatgtttctatctttgtttgcttactgcctttcaagtcgaacgcacgtgagacttggtgcgtgattctggtcagcgaaagctgacatattcttctcagaatc

SEQ ID NO: 13484 - DNA, 307 bp, Unknown
  gut microbiota DNA sequence
ataccgcttcataggcatcgccaagatattctgctacaaacttctgtgttatctcaaaagccctgtccggttccacctcatcctctttgaaggaaagaatgatgtgatacccctgtcgcttgtctgtttttccaaactgcttctttgtatccatcatctgttcaaaagccatatctgcctgacagttaacagctcccacaagtcttcctccctgcgttttctcaggattcatcacataatccagtgcccgtttcaaatgccttgcatgaaaagaattcccgctgtccttcatgtgaagtatcttact

SEQ ID NO: 13485 - DNA, 660 bp, Unknown
  gut microbiota DNA sequence
atctttcttggaatacagctgtgcattgctgttaaatacaatctgattgatgttaatgccgattcggtttatctcattgataagctctttaagaagtttccttacttccggataatcatttggtttctgactgattagaagcctgatatattcggcttcattcattccatttgcctttgccttatcagaaagtaccttcgcttcctgtggcataagtcttagtgttttccttatacaatgaactttatccgccatagaatcaccttcctctcttacccgtactgtattctcttactccttctgctactgttacagcagctttttccagttctttattacccagctgggcaataaccctgtctgcaagctctgtagcaacttctataagttccttaccataacaggttttatcaaacaatctgtccagtctcttttcatctgctttcagactttcatacttgctctgatactcgttatagtcgttaaaatcctttggatcactcctgtgtgcttccgcatcaagtatcagttcatagttccattcacagacaatatctataacatcatctatcgggtatggttcaatttcaccattctcctcagctacatcctgcctgtacatcttcccatctgaatctatgccaatggcataatcatgtc

SEQ ID NO: 13486 - DNA, 18009 bp, Unknown
  gut microbiota DNA sequence
gttactaatcgtttgagggcttgaccaaaaggttgaaatgaatcggatttctgtgtgaagttttgaaggtatgtaatataaataaatcaaaggggatgttccttttcgggagcgtcccctttgattttttatcgtaatgtgaatttgaaacaagtagaaagtacgtgattgatatcagatatgaagatgcaaaaagaaattttataggataaacagaaaaacagcagcctttcgactgctgtccttcacatagggagattgagttatgaaaatgtttatcaaaaataaagtagatttccttttgacaagtattataatatacaataaatgtgagcaaaatatgtcaaaattataaaagaagaagaattaattataaaagaatcatgttaaaattataaataaaaaataaagaggaataaaaaatggaattatcagaaggaagacctttggatacagaaggtcgcctggaaaaagaagtacgagtttatgatttactggatcaactagggattacctattggagaacagatcatgaagcagcgggaacaatggaagattgtaatgaaattgaccggattttagatgtactgatttgcaaaaatctgtttttgtgcaatcgccagaagacaaagttttatatgctgatgatgccaggggacaaaccattcaaaacaaaagaattatcggcacagatccacagcgccagactttcttttgcaccggaagaatatatggaggagtatctggatatcactccgggttccgtaagtattatgggattgatgaacgatacagacaatcaggtacagctgttagtggatgaagatgtgttacagggagagtttcttggctgccatccatgcatcaatacttccagtttaaaacttcgcacaaaggatgtgtttgaaaaattcttaccggcggtacatcatgaatatatggtagttcgtctgggacaggaagaggagaagtaagaatgaatcagtatatgaaaggtgtcttatgcacgatcattggtggtgcgtgctggggcatttctggaacctgcggcgaatatttgtgtacctatcgtgggatggacaccagagttctgacagatatgcgactgcttggtgccggaatcattctgtgtatttttcttgcatgtagagagcggaaaaaattgcaggagtttttgcatacaccaaaggcgttgatccattgtattatatttggcgtatgtggacttatgtttacacagtttgcatatctgactgccatttccaagacaaatgccggcacggctaccgtattgcagtatctgtctgcaattatcgtgctgctggttgtatgtgtgaaaaatcgaaaattaccggtattgcgggaaaatatagcaattatatcctgcctgcttggaacgtttctggtggcaactcatggaagttttacgtccctatatatatcgaaggaaggattgctttggggcatgctggcagcgttggcggcggctctctacatattaataccgcaaaaattactgtcagagtggggcagcattcttccagttggaatcggaatgttatccggcggaatcgcatttttctttctgatgcgtgtgtggaagatttctgtacagtttgacctgatcaccgcattgatcacggtggtgatcgttctggtgggaactgttctggcatttaccatgttcctgaaaggaactaatatggtaggacctgcacggggaaatatgcttggctgtgtggaacctttggttgcaactatttgctccgcggtttttctgaaaacagtattcaaagcaatggatctcattggatttgcttttattatagcgacagtgtttattctggcaaaagcagagaaaacgaaagcctgagagaatattatataattccgttgccttgtatgcactcaatgtattgtgatttgaactatgattctaaaaccaggtaaaaataagtagaaatagatacaaaagaaggatttcctatcaaacatgtataaaatacaggcaaaaaagaaaatagttacaaaaaagtaatgtgcggattgtacaaaaacatttgaaataaaaatataagtttgtgcacacttacaccgatgagtttgctattataataactgtaaaaacccccaatacattataagttttttgctacccccatagtaaaaaataccttctcttgaaagaacagcagatcgacaggctgttcttttttttgcattttatctggaagtatgcagaaaaatgaagtgtttatcttgctttttatggggatatatagtataactgtttgagcatggcaaaaataatgagtataggtttgctaagatgtacaaaatagatatagattttttgaatgaggtgcatcttacagcaggaatacagaggatattcttgaatacaaagtgatacagagggagcattatgtttcaaaagggtaaaaagagcagtccgctgactggtggactgagcattatgattgttgggtgtggaaaagttggtaagacactggtagagcgtctgagcaaagaaggacatgacatttcagttgtggacaagagtgcggcgcgtctgcagagtgttacaaatatgtatgatgtatttggtgtcgttggaaatggcgcaagttttaccgtattaaaagaagcgggaattgagcacacggacatcctgattgcggtgacagattccgatgagctgaatctgctttgctgtctggtagcaaagcgatccggaaactgtgatgttatcgccagagtgcgtacgccggattacagtgaagaaaaaacgtacctgaaggaaaaattaggactggcaatgatgatcaatccggagcaggaggcagcaaatgcgatctcacgtattttatatatgccgacagcgttggatgtggcgccttttgccagaggacatgtggaaatggttcgtatcaaacttccggaaggaaacgtgctgaccggaaaacggatcgcggatcttggttcagaactttccggagcggtactgatctgtgcggtagagcgaagcggagaagtctatatcccgggtggtaattttgaactggcagccggtgatgtcatcagttttattgcgccagtgcgggatggaagaaaattcctgaaaagaaacggtttccatactcatcaggtaaaaagctgtatcatcgttggcggtggacgtgcggcatattatctgggaaaacgtctgatcgaacttggtatttcggtgcagatcgttgaaaataaaaaggaacgctgtgaggaactgagtgtcttgcttccacaggcaatcgtggtaaatggtgacggcaccagtgaagaactgttaaatgagattggaatcacgacgacagagtctttggttccgctgaccggaatcgatgaagaaaatattatgctgaccttgtatgcaaaagaagtttccgatgcaaaggttgttacaaaaatcaatcgtatcacctatacaggtgtcattgaccagctggatctgggcagtgtggtatacccgaagtatattacttcagaagcgatcattgcttttgtacgatcaaagaccgcaacaatgaataataatatagaaacaatgattcatctgtttgatgaacgtgtagaagcaattgagtttgttgtcggggatcagtctccggtggtaaatgttccactggcagatctgaaactgaaatcaaaccttctggtggcatgtatcaatcaccgtggaaaagtcctgatcccggatggtaatgacgtgattcagggcggagatacggtgattattgttacgacaaataccggttttcatgatattgaggatattttacggtagatggagggggcatagatgaataaatcaatgattgcctatattttaggctggattttgaagctggaagggctgtttatgcttatcccgattctggtagccatcatttaccgggaacataatggaatctggttcgtagtagttgctgcctgcagtcttgcgttgggaacgttgatcacacacagaaaaccggaaagcaatgtattttatatgcgggaaggctgtattgcaacagcgctgagctggatgatcatgagcgtagtgggatgtctgccgtttttcttaagcggggagatcccttcctttacggatgctttatttgagacggtatccggttttaccaccacaggatctacgattttaagtgatgtggaagcattgtcttattgcatgctgttctggcgtagttttacgcattggattggcggtatgggcgtacttgtatttttgctggcagtcatccagatgaccagtggttccaatatgaatctgcttcgtgcggagagtccgggaccgtctgtgggaaaactggtgccgcgtatgatgcacacggcccgtattttgtatgtcatttatatgggattgacggtaattttgtttattttactgctttgtggaaatatgtctgtgtttgaatcgctgacaacggcattttctacggcgggaaccggaggcttcggcattcggaatgacagtctggcaagctgctcaccgtatattcagtgggtggttacggtatttatgattttatttggtgtgaattttaatgccttttatctgatccttttgcgcaactggaaacagcttcgccatatggatgaggtatggtggtactttggcattatcggagctgccattttgatcattatgacaaatacctatggatgggctggcaatattctggaaaacctgcgaaatacgtcatttcaggtgggctctattataacgactaccggatttatgacggtggattttgaccagtggccatccctgtcgcgctatgtattgctgtttttgatgatgatcggagcctgcgcgggaagtaccggtggcggaatgaaggtcagtcgttttcttctgtccgtcaaatcagcactgagagaattgaattcctatctgttcccgaagagtgtaaaaaagatcaagatggatggaaaaacagtagatgaggaagccattcgcggtattaatgtgtattttaccgcatatattctgttggttgttctgtctgtatttttgatctgtatcaacggcatggacattgagagtgcgttttcgtctgttctgggtacctttaacaacatcggaccgggacttggaaaatttggaccgacctgtaattttggctgggtatctacattcagcaaatatgtttatatttttgatatgctggccggaagactggaattgttcccggtattgattcttttgtatcccccaagctggcgtggtctgttaaaacgcagcatgaagcgcaaaaagaacaaaagagcgacaaccatctgatgaattttgaactatgatatgagttttttcgtggatattcttgctgatttttgaataaattttaagaatttctgaaacctatttacataggaagaaaaacttggtacaactattataaaagtagtacaaggttcgatcaggaggaggagcagatggttttcacgaagttaatttatacatttttggtggcaatgataccggcggtggaagtaaaaggggcaattccttttgggatggcgttacagcttgctccgtggcaggcatatctgatggcattatctggcagtttttttgtcgtatgttttctggcattttttacacattggttttatgtggaatgcaaaaagcatggatttctgaaacaatttatcggctggatcgataaaatggttttgaaaaataaggataagatccacaagtatggtccgctggcaatttttgcatacgtggcagtaccaattccgggaaccggaacatggaccggaagcattattgccggtgtattgaatatgaagccacaggttacaatcctgtgtgtaatgtgtggaaatgcagttgcaggtatgatcatgacgctggcaagtgccggtgtgatcagcatgatttcaaagttataaggtacagttcgtttattataggtattcagatatcaatcatgcttgcatagggagatatgtggatgcacaaggctaaatgaacggtaatcaatataaaactggtatgtatgcaacagtaaaaactggctcttgaaaaaggtcagtttttttgttactttataaaaaattattttgcagaataatatggagataaatcaggatttatgacagaatcacataacaatcagaaaaaaattgctgtggtaaatgatttttccggatttgggcgctgttctattgcagttgcgcttccgatcatctcggcaatgaaaatacaatgctgtccggtaccgacttcgattttttctaatcacacgggattcgacagttatttttttgaggattatactgaccgtatgaagccttatattgcagaatggcgtaagttagggctgcattttgacgggatctgcaccggattcttgggatcggtggaacagatcagtatcgtcagcgaatttttgcgggagtttggaaaaaatgaggatggtgggaaaaagacaatcgtacttattgatccggtaatgggagattacggcaaactttatccgacttacacgatggagatgtgtctggagatgaagaaactggtccagtatgcggatattctgacgccgaatctgacagaagcctgtattctgaccgatacgccgtacagggaacactggcgtgtggcagagattgagaaaatggcggaaacgttaagtcagatgggaccggaaaaggtcgtagttaccggtattccacagcacagctttgtggcaaatctctgttacgaaaaaggacaggggtgcaaggtgatgcgtacccataagattggcacttcgagatctggcaccggtgatatttttgcgtcaattctggcagcagatgccgtgaacggggttgcttttgaagaatctgtaaagaaagcttccaactttatcaaaaaatgcattttaagttccatcgagaggaatatcccactgacagatggtgtctgttttgaggatcatctgggaacgctggcgcgataaagcacagaacaatcttgataggatatccgataagcgaagtcatcgaaagtaagtgaagcaaaacgtatcattatactgatataaaaaagagtggattataagtggattataaatagaaagaaggaatgaaaaatggaaattttatacaaagtacatcatgggttatatgtaaacctgacaaacaaatgtccatgtgcctgtacattttgcctgcgtcagacaatggatcatgtaggagaatcccacagtctgtggttggatcatgagccttctgcagaggaagtcatcgcagaattcgcaaagtttgatatgaatgaatttgaggaagttgtattttgcggctttggtgagccgacagaggcattgcctgtattgctgaaagtggcagcttatgtcaaagagacattctcaaaaccagtgcgtatcaatacgaatggaatgggaaatctgatctggaaccgtgatatcacaccggaatttgaaggcctgatcgatacggtatccatcagtctcaatacaccgaatgcagagcgttatcacgaacttgtgcgcagtaaattcggagatcagtcctttgatgcaatgatagattttacaaagaagtgtaccagacatgtacctaaagttgtcatgacaacggtagagactacgatcacaaaagaagaagaagcgcagtgcagaaaaatctgtgaggaaattggtgctgtttaccgtatccgtccatgggaagattaaaacattaaaaagcaaatatttttgaacaataaataatgaataagtaatgataccgccggtcggcagaccggcggtgcttttttccttgcaatttagcaggaactttattataatttagattgcctgttaatggcagtaatattgatacatacacagatttatctcagtcgagaagactcccacttttgtaagtggtgagtaataacaagtctttctcagtgggagtacaatctccgactgagataaacgctccgcgaggatgtgcagtgattctgagaagaatatgtcagctttcgctgaccagaatcacgcaccaagtctcacatgagttcgacttgaattgtgaagttctatagcaggagaatgaagatgtggcagctgattttgggaactgcaggatttgtcctgtattttgtatatgatatcaacagtattctgagtaagaatgtatgtttgcagaaattttttgcattggggagtattctagtcgtggcgtctgtcgtagcagagttttgttctgcgtggggacaaggtcatcggagcctgggagcagtgatcggatttggaatcggagcattgttttttcttggtatgcttatctataccttgttttttgcccttccctttgaagaaacctattgtgaagaaaataaacttcgtgctgcatatacagagggagtgtatggtttgtgccgtcatccgggcgtgttatggtttgcgggtgcctttttatgcatgtggggaatgctggggggattaagacagggaatctattttggacttatgattttctggaattatctgtatatcatttttcaggatctgtggacatttccacggacattttttaattatagggaatatcaacaaagtacgccatttttaattccgaatggaaaaagtatccgggcgtgcatgaaaagtataagaaaacgcagcaatcaatctggagtggacaacctatgagcctaaaagaaaaattgaaaaaacatcaatataatgaaatatggcagcagtactgcggattccttgatctgtccatggaaggatacatgaagatccagcggcggttgatggaagagcagatccaactttggagcaactgcggactggggcagtccattttgaaaggaaagcatccgagaaatctggaggaattccggaaaatggtgccgttgacagggtatgaagattatgcagatattctgttgagcaagcagccggatatgcttccgggaaatccggtgatctggatacagacgacctgggaaggtggcaagcacccgatcaaggtagcaccgtataccagaagcatgctggatacatatcggaataacgttatggcctgcctgattttgtctacaagccgtgaaaagggatcttttgatgtggcttccacggataagtttctgtatgcgctggcaccgttgccctatgctacaggattgttcccgttggcattgggagaagaaatcgatattgagtttttaccggcgatcaaagacgctgtgaatatgagtttcagtgagcgtaacaaactgggatttaagatggcaatgcaaaaggatctgggatttttcttcggtctgggaagtgttgcctatgcagtcagccagagcctgtcatctctgacaagttcaggcggtggagtaaagttgtccagtctgttaaactgtaaaccgcagatgctcatccggcttttgaaagcaaaataccggtgcaggaaagagcagcggcagctgcttccaaaggacctcttccatctgaaaggctttatggtagcaggcacagacaatctgtgctataaggatgatctggaagaactctggggtatccggccgatggaattgtttgcaggtacggaaccttccatgatgggaactgagacatggacgcgtaaaggcatgtatttcttcccggataacgcattttacgagtttatcacagaggaagacatgctgaaaaattatgaggatccatcctatattccaccgacatatctcatggatgaggtacggccgggggaaaaatatgagctggtatttactattttgaaaggcggagcgtttgcaaggtatcgctgtggcgatatatatcgttgcgtcggtctggaaaaccgggaagatgagacgcggatcccgcggtttgagtatatagaccgtgtgccctggatcatcgatattgccgggtttacacgaatttcagaaaatgggatcaaaaatgtaattggactttcaaagcttccaattataaactgggtggcaacgaaggaatataatgagcagaaccgaccgtatttgcacatgtatgtggaactggagcgagatgcactgctgaataatgccatgagtgcaacgattctgaaagatctgctcagtacctattttaaatatattgatcaggattaccgtgatctgaaaaaaattttaggaatggatcctttgcaggtgacgattcttacttgcggaacatttgagacttatgagaaacggacagggaaaaaactgtaccatatgagcccttcacattatgatttaaaggggttacttgaggtgcaggcgagtatgaatagagtgagataagagggatatatgggaacctacggatatatttcaattatagccatggtgtgctatggatttatgttgctgatgtttctggcagcaaagagaaataaaattgtaaacagctttctggtggtgctggcaggactgcttttgtggaccgggggttctgcctttatgcgtgcgcagctctggccgcattacgcattctggtatcaggtttcattatttggaatcttacttcttccatacgcatactaccgttttattctggcttttggcggtgccagggaaggcatgacaggtagaatctatctggtagctatgcttacctgtcttgtggcaaatatttggaatggcgtctttctggcgtgtcctgaacttatagaaaaaaatggaagatcaacctttgtatacgatattaaaccgacgattctggtattattctttcttgttggagcatttctgctgcacttgtttgtaatcctggtgcgtatctgcaaagcaaatccgaatatgaaagtacaatatgatccgataatgtttggcgttgtggtactatttgccggaaacgttctgatcagtctgccgcagctttcaggtttcccaatcgatgtactcagcggtgtcattaatgtatttctgatattttatgcacttacccgcagacacctgtttcgcttgcaaatgctggcctcttccggattatgctatggtgttggatttctgttttcagtaatcgtgttttttaatgtggttccatatcttcagaaagtgcttcatttagagatggataaaaatatgacggtgtttgcacttgtatttgcagtgatctttcttgtcatttatgcgctgtttacgtttttatggaagttattggtgagaaatgtgtttgtaaaggaagaagttcatcaggcggaaaaaatcaaagaattcagttcggcaatttccaagacattggatctgcaggaaattctgaatcaaacgatccttgtgttgaaagaactgatggatgttggaaatatctatatctgtatgcaggacgcatccggtcagccatatcggggatttaccagtgatcagccgctcaacgacctggctttttcactggaggaggaaaatccgataatccagtggctggcagttcatgatgagcctctgatctaccgggaatttcgctatacggtggaatacaaatccatgtgggaaagtgaaaagcatcagttggataaaaagcatatccgctattgtgcaggactgaaggacggggactgtctggcaggtgtgatcctgatcacagcaccttcttcgaaaaagggacttgtatatgacgaggtgcagctgatctcctccgttacatcggtagcgtccattgccatcaagaatgcgcggttgtatgagaaagcctgcattgaggcgcggacagatgagatgaccggactgttgaaccgaaagtatttttatgaagtattaaatgaagagtttgagaaaaataaggaagcatccctggcacttgccattatcaatgtggatgattttaaactatataatcagctgtacggtgtcaaggaaggggacatctgcctgcagcagattgccgcgatcattcgcagcagcgtaggagacagtggatatgcagcccgttacggcggaaaagaatttgcagtcctgcttccgaaatatgatctgttttcagctagaaatctggtagaatcaattgcaaagcagatttttgtaatgaataaccgacggacggatatgaagctgaaggcggtgactgtcagtgcaggaatcagtgcggcaccgtatgcagccagaaatgtcaaggaattgatggagaatgtggatctggctgtctaccatgtaaagcacagcggaaaaaatggaatccaggtgtttgatacgatgtttcgtaataataacgcgcaggggcttaccagagaccgtgctcatatttaccgcgaatatgaaacaacgatctatgcactgaccgcggctatcgatgcgaaggatcattatacgttcagccattctaataacgtggcctattatgctacgatgctggccacagcactcggcatgaatgaggatatgattgagatcatccgtcaggctgctttactgcatgatgtgggaaaaatcggaattccggagtatgtactgaataaaccggggcgtctgactgatgaggaatatgagatcatcaaaggacatgtggaagcatcgattgacattatccgtcatcttccatctctggattatgttatcccggccgtcatcggtcatcatgaaagatatgatggaaaaggatatccgagacgaattgccggcgaggatattccactgacagcgcgaatattatgtatagcagattcctttgatgccatgacatccagacgctgctataaaaaagcattttcattggaggtggcgcgagaaaaactccttttggatgctggaaagcagtttgatccggagctggcttataagtttgtagattgtctggacaatggtacgatcactttggtagaatccgaagaattacagtaaaaattaaaaatagaacttcacatgaaaatattgtgatcaggaaggaatatagaaaaattctttctatgatcgcaatattttttttcttttcaaacctttttgataattttttccgaaaaggggttgacaataaacgttagcggtggtaaacttcgtatgctgatgttaggaaaatctaacaaaatgtagctaaaattagttgaaattgtgaaaaactaatacaatatagtgtaatacatcaaatattatgatgtattaataaaatgtagtttgctatattatatgatgatgacttctaacaatatatagctatatgtatttgctgttactttttactaatacaaaagaaaagaaaatctactgacacgggagggatatttttatgatgcctttagcaatggcgaaaagtggagaaacagtagtgatcaaaaaaattaccggaaaagattccgtgcgtcagcatcttgcggaactgggactggtagtagatgaatccgtaacagttgtcagtgaactgggaggaaatattatccttcaggtaaaggacagccgtattgcgctggatcgaagcatggcaaccagaatcatggtttaagcatagaagagaagaaaggatgagttttatgaaaacattaaaagacgcaaaagttgatgatgtagtagttgtaaaacgtctgcatggtgaaggcccgatcaaacgtcgtatcatggacatgggaatcacaaaaggagttcagatcaaagttcgtaaggtagcaccgcttggcgatccgatcgaattaaacgttcgcggttatgagctgagtgttcgtaaagctgacgctgagatgattgaggttgagtaatcatatttttttacataaggattagaaagttctaataacagttatgaaaaactatgaaaataaaagtagagaggagatataaatgagtatcaaaatcgcacttgcgggtaacccaaactgtggtaaaacaactctgtttaaccagttgaccggtagttctcagtatgtaggtaactggccgggtgtaaccgttgagaaaaaagaaggaaagttaaagggacacaaaaaagacgtagtcattcaggatttacctggtatttactccctttccccatatacactggaggaagtagttgccagaggttatctggtaaatgagcgtccggatgcaatcttaaacattgtagacggtacaaacattgagcgtaacctgtacctgacaacacagctccttgagcttggtattccggttgtaatcgctatcaacatgatggatattgttcgtaaaaacggcgacaagatcaatgttaagaaactgtctgagacacttggatgtgaaatcgttgagatcagtgcgctgaaaggtgaaggcggattcgaagcagctcagaaagccgttgatgcagcagagaaaaaacaggatgcaactccacttcatgtatttacaggaagcgttgagcatgcaatcgcacatattgaggagtctatcgagacaattgtagatcacagatatcttcgttggtttgcaatgaaactcttcgagcgtgatgaggaagctgtcaaagatttaaacattcctgcagatgtaaaatctcatattgagcagcatatcgttgactgtgagaacgagatggatgacgatgcagaaagtattatcacaaaccagagatatgcttacatcagtaaagtgtgtgatcagtctgtaagcaaaaaagcagaagtacacaacctgacaatctctgacaagattgaccgtatcgtaacaaaccgtattcttgcattaccaatctttgcaggtatcatgttcctgatttactggatttctgtaacaaccatcggtggaatcgttactgactttacaaacgatacactctttggtgagtggatctgtggaaacttaggaccggctcttgagagcattggatgtgctgactggttagtaggtctgatcaatgatggtattgtcggtggtgtcggtgctgtgcttggtttcgtaccgcagatgttagtactgttcttcatgctttccattctggagcaggttggatacatggcccgtgttgcatttatccttgaccgtatcttccgcagatttggtctttccggaaaaagctttattccgatgctgatcggttccggttgtggtgttccaggtgttatggcaagccgtaccattgagaatgagagagatcgtcatatgacaattatgaccacctgctttgttccttgtggagcaaaaatgccgatcatcggtctcttcgcaggcgcattattcggtggttccggactggttgcagtttccgcttacttcattggtgtagcagcaatcgttatctccggtatcatgctgaaaaagacaaaaccatttgccggtgaagtagcaccattcgttatggaacttccggcttaccatattccaacagcaggttctatcttacgtgcaacatgggagcgtggatggtccttcatcaaacgtgcaggtactgttatcgtagcttcttccgtaatcctctggttcttacagggatttggattcgttgatggtgcatttggcatggtggaagataataactccagtttactggcagcgatcggtggagcaatctgctggatcttcgcaccgcttggtttcggtgactggcagtcaacagttgcaacaatcactggtctgatcgcaaaagagaacgttgtatctacatttggtgtcctcttcggtggtttctccgaagtggcagaaaacggcgatgaagtatggggtcaggtagcacttcattatacacagttaaccgcttacagcttcatggtatttaaccttctgtgtgctccgtgtttcgcagctatgggtgcgatcaaacgagagatgaacaaccagaaatggttctgggcagcaattggatacatgtgtggtcttgcatacatcgtatctatgatgatctaccagtttggttccctgttcacaggaaacgttcatccggtaggactgatcgttgctattatcgagttagtatttatcatctatatgcttgttcgtaaaaatccgtatgttgatgaagcaacaggtatggcaaaaaaagtagcataatctgaaaagtgtgctaatatagtattaaagtagttaatatcatttttattaaaatctaaaaggaggagttctaatggcaactgtaattgtagcaatcattgtattcggcctggttggtctgattaccggaaaaggtatttatgataaaaagcaccataagagcggttgcggttgcgattgctcatcctgcggtggcggatgccattcacagaaataacatcttgttttgagatggcttaaaaaattacttcgttaagctttaataggaactcctgcaattttgcctcagtcgctaacaatcgctccttgaggaaaaattgcaggagttcttgctatacacagtgaaattagtaaatttttgcaccatctcggcactgcgtgccacgtgcacatttaagttataataaaaatcaacactatgttgtgcacgcaataatgtatagtaaatgccacaggcagcataatgattactattttagtgattgcatgtacgatattgcataagaataagcagtatgggtttgatactgtataaatgaaagaatctcgagtgcattacagtgttttataatctatttttccttttcatactcttgaaaaattaactatcagtgttagtttttgtaaaaacaataaatataatggtataggacaaaaaattatatatatgtttatttttgaagcggtaaaaaattattattatggtaacgtaaataagaaaatccctgtattttttcttgagaagcgattgttagcgaacaagacaaaatacagggattttcgcttcattacctaaaaattttcccacaaaaaaatcttgacttggagcaagctccaagtattatacttagcataaagaagcatgagaatacgattagatagagacaaaatgggaacaatccggagaggagacgttttatgacaatcaaagaagtatccgagcattttggcatcagtcaggacacccttcggtattacgagcgtgtcaaaatgattccgaaagtgacaagaacttccggcggcatccgggattatcaggaagaggatttgaaatgggtggaactggctctctgcatgaggagtgcaggtttaccgattgaggttatgatcgagtatcttgatctgtatcagaaaggcgatgagacgattccggcgcggttggaacttttaagtaatcagatggaagtattgcaggagcagaagaaacagctggaagcaaccatgaaccgactggcttataagatcagtaaatatgaagaagcaatgaaaaccggtaaactggtctgggacgaagactgtgtaaagaaatgtatcaaaggagaatagaaacatggcaaaattagtagcattttattcaagatattatgcccaatcgaaaccacagtaaaggtgacaggtatggaactgagagtattacattattttctgactgtggcgaaggaacagagttttacgaaagcggcggaacaattacatattacacagccgacgttgtcgagacagcttgccgcgttggaggatgaacttggaaccagacttttttgccgtggtggacgaaatatcacactgacggatgacggtcttttactgaaacgcagagcgctggaaatgatcgatctggaagacaagatcgtggatgagattaagggcaatgaagaagtatttacccaagtaagaagttgcttgatgtaaaagaataagagagtctgatcaaggtaaatatttgagaagataatttgttttgtaagaaacttacagtattatggagagaaagagataagtaagaaatggaggaaaagacgatgagcaaaacattagtagcatatttcagtgcaagtggcgtgacagaaaaagtagctgagatgattgcagaggtatccggttctgatctgtatgagatcgcaccgaaggttccatatacaactgcagatttaaactggatgaataaaaattcaagaagcagtgttgagatggcggataaatccatccgtccggaaatggcagaaggcgatgcagcaattgaaaactatgacactgtcgttatcggtttcccgatctggtggtatgtagcaccg

SEQ ID NO: 13487 - DNA, 11910 bp, Unknown
  gut microbiota DNA sequence
aatacgatttttccggcaaaaagatcattctgtttgcaacatccggcggaagcggattcggcaataccatcaaagagttacagacgtctgcaccacaggcacagtttgtagaaggaaaacttctcaatcatgtaaataagaaaagtattgaagaatgggtaaagacctggtaagaagatcagaggcagaggattttctgtgaagaatagcagcattagttttgtgctaaaaagatattgcagagctatggcaaagaattctatatagtaaaaagcggagcagttacatgtggtgtgtaattgctccgcttttctatttgatagcacactttcttgtatattcaaacaagataaattctgttataatgtgaacacacagaaaagcggatttatgtaacgggaataaattttcaggaggaagaaaaatgatcacaactgataaatgaacatgttcgatataaactgtatcagatctttcggtgtgatttgatcctgctgccggtttcaacagaacgaatactgattttaccaacggaatatttttcgtggcagaacgactttccttatatgcgggatctgctgcagtattttaatcagatcagcaaggagaatgactgctttttctcagattccatcttttatttgagatatatggacgaaaaaagatccatactgtctgccgtaccgaatgaaaggtcaattaagataatcatgggaagaagcatggattatattcgcatttcagagctgaaattgcgtatgcagagcgagaaataaatattttctgaatgagccgtatcattcgctggttgatcctgtggatgacacaatatgtgatgcagtaaagaacttgaaaaaacagcttcagccaagtttgatgatgcaggaaatatttgagcgaagtgctgcatcgggagagtggcagtggtagcagacaacattctgagcgagcagcgagagtgaattgcaaagatctgtcttgtagtaggaaaatgagggggaagcatgatgaaatatacagaaaatggaattcagtatcacattggtttaaaacagggggatgttggaaaatatgttattttgccgggagatccgaaacggtgtgcaaagattgcagaactctttgaggatgcacatttagtagccgatcacagggaatttacgacttacaccggctatctggacggggaaaaagtcagtgtgacctcaacgggcatcggtggaccttccgcggcgatcgccatggaagaactggtgcgctgcggggcagaagtttttatccgtgtgggtacctgtggaggcatccgcacagatgtcaaaagcggcgatctggtgatcgctaccggagcagtccgcatggaaggaaccagccgggaatatgcaccgatcgaatttccggcagtggcagattatcatattgtacagaaactggaagcagcggcgaaagcaaacggttatccttgccacatcggtgttgttcagtgcaaggattctttttacggacagcatgagccggaaaaaatgccggtaagttacgaactgacgcagaaatgggaggcatggaaacggcttggatgtctggcttcggagatggaatctgcagcattgtttgtggttgcaagttatctgcatgtaaaaatcggttccatttttctggttgtggcaaatcaggagcgggaaaaactgcatttggaaaatccggtggcacatgatacgcaggcggcaattaagagtgcggtagatgccattcgtctgatgatagatgataaaggaagataaagaagatagctgaataagatagcagaaagagaaaatgcctgcttatggaacagtgtgatctgtggcagagattgtgtgctgaaaaataagaatatcgtatgtaacgcatggaattgaaaaagtatggaagaaaagaacacgaatcatagtaaaaataacaacaggaatgataataatcgccttgtcgatcgcaatcataattgtcaaagtatccgtagtcagcgtgttggtggactgatcctggcagcaggactgtccacccgcatgggacagtcaaagccactaacaaaatttcttgacaaaaatttgattgaccaaacaatcaaaacgatgtatgatgcaggtatagataatatccatatggtaaccggatttgaacaggaacgcgtcgaagcatatttgcaggcaaacgatttattcaaccgaattcatactatttggaatcccaattatggaaatggaagtatcctgacatctatcaaaacagggcttcccaggctgaaagagtttgattatgtattcatccaactggtagatctgccttgcattttgccggaaacctatcagaaattatgggagaccatgcttgcttccaggaaaaaagcagtcataccaacggtagatgggagacgcgggcatccggtattgatcgacatgtctctgctgccggagattctttcttatgaaaatgctgcgggtggcggtggtctgcgcggtttttggaagctgctaggggatgaatttttagaagtcccggttacggattgcggcagcgttatggatacggatacgaaggaacagctgagggaagcagaaaggtatctgatacaacgcaggaatgcagagaataccgaacacaaagtagatgtcagcttgcgctgaccagaatcacgcaccaagtctcacgtgcgttcgagttgaattccagtggcgctgagcaacaaatggaatgagcatattttgtattttcttgaaggacaggatcaggtcagcaaacattaagatattagattggacggagtggaacaatgcagggaatcgaagaactgttacgggaaataaaacagacgggagaaggatcttgggaattaaaaattgaggatactgtgtatgaacggcggtttttcagaccagagcgtctgattatacttggcggtggtcatgtgggacaggcaatcagcaaatttgcgtcagcagttggattttatgttattgtggtagatgacagaccttcctttgccaatcgcagttgctttccggatgcggaagaaatatactgtgaagaatttgaaaaagcgttagatatgcttcaaataggaagtaatgattatgtcacagtagtaacccgtggacatcgatttgatctgacctgcctgcgaaaagtgttaaaaggtatttttccacgttatctggggatgatgggttccaagcgtcgggtagccggtatcattgatctgttgcaggaagaaggaaatgccgcagagaccgtagcaaaaattcacatgccaatcggattaaatatcggtgcgctgaccgtcccggagatcgcgatttccattgtggcagaactgatcgaagaacgcagaaaaggaacgccgcgacgttcacacagccaattgctgacttgtaccgatacagattcgcgggtgatagaaatgcttggtgatccaaatgtcggaaaagctatgctgctagtatatgacaccagcggctccaccccggtaaaatccggtgcactgatgaccgtcaacagcaatctgcagtcagcgggaaccatcggtggcggttgtaccgaaaacgaagtactgcgggaagcatttcgcatgatcggaaccggagaaacaaaactttttacactggatatgagcaacgaagtagcggcagatcagggcatggtgtgtggtggccgtatgttggtatacgtagcagatcttggttaatgtagagagtactttagttatgctttgttgcgagcgaatgttagttccatttatcacaacgtaaatagcgccctcagctattttttcttttcgagcgattgttagccgaaaagaaaaaataactgagggcgcttttataaattttaaattcattataagacgaaaattttatatctgtcccgccggaatccgtttctgtctatgtcgttcaattaccgccgcaatcgaaccatagcacacagaatacataaacgccgccagcgcaaatgctgtcagtacatcaaatacagaatgctgcttgataaacattgtagataaaataatgcaaatggtcagaaccagtgcaacatacttaatccatggatgctttttgattttttcactgtgacaaagtgcaaaataaattccaagagaattgtatacatgaatgcttggaaacagattcgtcggtgtatccgtcgcatacagtttctgcacaatgtgtacaaaaatattatcccttgcaaagctttccggccggagtagctgtccgttcggatatatcgccgagatgaaaaggaacacagtcatacctgtaataaggaaaattcccatccgccagcagagttttccatctgtaaatgcgataaacagaattccaattgccatgtatacaaaccacagataatatggaatgacaaaaaattcgcagaacggaatgtaatcgtccaatgccacatgaatgacatgaaagtttgaattaatgtttacttttttctccaggtaagtgaaccatggaatataaataagtgcataaagcaatagaaaaaagtgtgtgttatgttttagatagttaaaaaattttttcatactcaactttgctccgcgatagtcataatctgtttacgctaaaaactgtatgtttcaaatacagtttttcctcaaggtttatagaagagtgtagcattataaaaggaaaaaaacaatgtggaaaatattaaatttaccttaaataaaatcattgtaagttggtggaaaatacgggatagcataataaataaggaagtaaaaagatcctgtgaacacagataaatgtttgcaggatctttttggtatcggagtgacaagatttgaacttgcgatctctcgccccccagacgagcgctttaccagactaagccacaccccgaaagcagatagaacgttacagaccatacgcgccattcgcaaaacgccctttcgggcttccacgtagcttcgctactacttttgctcataaaaaggcgctccctttatcactatgtatccagctaattcctcatgcaagcatgatcattacctgaatacatgtgatgagtgaactgtaacgcatattttatcataaaaagatatgcttgcaaagccttttttcagaagttatacttagatgggatatggaaaatggcagggtgggacctatttggacgaaaagtcgattttgggaggataagtatggatgaacagtttttatctccgatagaagtcgcggagatattgcaggtaaagaaaaataccgtttatgaaatgatcaaacgtggtgatctgaaggcaacgaaaatgggaaaacagttccggatcgcacgaaatgatctgtatgaatacatgggcataagcccggaagcagagtctgcggaaaatattgtcatctgtggacaggatcagcttctggatgtgctttgctctctttataatgaacagagtgacggaaaaacacatgtgtaccggtctccgatgggcagctacagcggattgtaccggatgtatcagaatgaaaattatgtggcaacctgtcatatgtgggatggcaaaacagatacgtataatctttcttatattgaacgtatgctgccgggagaacaggtggcagtttttcatctgttaaaacgctggcagggcttttatgtcagagagggcaatccgaaaaatattcaggaatttacggatctgaccagagaagatgtcagaatgatcaaccgggaaaaaggcagcggtatccgcatttttattgatgagatgtgtaaaaagctggagattgatccggacaagctcagagggtatgaggatgaagcatcatcacatatgatcgcagcaaccaatgtattgcgcggaagtgcagatgtggcgatcggaattgagaaggtagcaagtcagatgcagggacttgattttattcctctgaaacaggaaagttacgatattgtatttcgaaagaaagatcttaagcgcagcgaatttcagaaactgctgaatatcattcgatcagatgaatttaaaagtgaagcggaaacgatgtcaggatatgatgtcagtgaaatgggaaaacagctctggtaaggagctgttttttgttttacaggaaatttttctgaatttcctgtaaaacaaaatttcctaatatataaacagtgggaaagataatatatgtcgtacagtggatgtacattttttgccgatgacaaaaaagtaagtaacttacatagatgtaactaaggctgtttgttcaaaaaataagttttgaattttaggtataccacaaaaataccaagaaaaagcattgacagaaaaagaaatgtgtagtataacaaaacacatgaaacacaacaaaacatgataaaacaaaagaaaaaaggatgagagaaaaggagatgaagaagaaagtaatcagccttatgcttgttgcagcaatgggactttccctggcagcatgcggaaacaaaaacacagatcagggggcagcaactgacacatctgcaaaaacagagcagacagatgcttctgaggcagcaccagagatagcagatcagctggacagcacaacaatcacagtatttgcagcagcaagtcttgagaatgcattaaacgaagtaattgagaaatacaatgagtcacagccaaacgtaactgttgtaccaagctatgacagttcaggaacactgcttgcacagatcgaggaaggtgcagcttgtgacgtattcttctccgcagctcagaaacagatggatacattacagaatgacgatcagttagtagtagacggaacacgtcacaatgtagtaaacaaccaggttgtagttatcacatacaaaggaagcggtacagcagtaacaggtcttgagaacctgaaagatgcaaagagcatcgcacttgcagacggaagcgttccagttggtaaatacacacgtcaggcacttgtaaacgcaggtatccttgatgctgtagatgatgtatctacaatcccgacagatgttgtttctcaggctctgggcggagttgaaatcaacgagtgcggtaacgtaagcgctgttaaaactcaggtagcagaaggatctaacgaagttggtactgtttactactctgatacatatggtcttggggacaaacttgagattcttcaggttgtaagctatgatctgacaggtaacgtaatttacccgatcgctcaggttcagaatgatgaagctgacgagttagagcagaaagcagctctggatttcgtaaactttgttaaatctgatgcagcaaaaactatttttgacagctactacttcgatacaaacgtagaagattaatattagcttcttttgtggctaaaatttacgctgtgaaaaagacctctggcgattttgtctcgtcagctaacaatcgcttgccgagaaaaaatcgccagaggtctttcttctaagttgtgtatatagttcaggtgtgcataacaaaatgatatcagtaatgagttttttgtttcgtgcaacctgaaaattaagtagaatgtaagtgaaacccgggtggcgaaagctggtcgggttttatctgaataagatagaaattgaaatattttctgttttaagatgctttatagcgtgtaagagaaatgtctccggatatatgatcggagcatagggagaaaaatatggacacaattatggaaattgtaaagaatctggattggacaccgttgtttatttcctttaaaacaggaattgtggcaacggttatttcctttttcttaggattatttgcggcaagaaaagtcattcatgccggtgagcgtgccaaagcgatcgcagacggatttttgacgctgccgatggttctgccgccgaccgttgccggatttttcctgctgttgttatttagtaagagacgtccgatcggtatgtttttgtttcatcagtttggcatcaaagtagtacagacctggcttggctgtatcattgcggcaacggtgatttcgttcccgttgatgtatcgaaatgcccgtgcttcctttgaacagctggatgctaacctgatctatgcagcgcggacacttggtatgtctgaattgcagattttctggaaggtggcagtaccaaatgcaggaccgggtattatcgcaggaacgattctgacctttgcgcgtgcacttggtgagtacggtgcgacttctatgctggcaggtaatattcccggaaagacgtcgacgatttcgcagaagatcgccatggttattcaggatggtgattatctgacggcaggcgtatgggttattattattttagcgattgcttttggcattatcgttgcaatgaaccttgtagcaggaaaaaatatgaaaaatacacagagctggtaaatacgttccctgtatctgtttataaaatgcaaaaaacgaatggatatgtgtaaagcatttaaaatgttttgagcaaaaatgggaaaatctgtgttgtgaaaggaatactatggcaatagaagtagcgataaaaaagaaaattggcaatttttctctggatgttgcgttttcagcaggggaggaaatgtttgccctgcttggtgcttccggatgtggcaaaagtatgacattgaagtgcattgcaggaattgagacaccagatgaaggaaaaatcgtgttaaacggacgtaccttatttgactctgagaaaaaaatcaatctgattccgcagaaacgaaaagttggatatatgtttcaggattatgcgctgttcccgaatatgaccgtcgagaaaaatatcatggcgggtatgggaaagaaaccggaaaaagcgattgtgcaggattatatccgacgtttccgtctggaaggattggagcatcatctgccacgtcagctttccggaggtcagaaacagcgtgtggcactggcgcgcatgatggcgtcacagccggaaattctgttgttggatgagccactgtccgcacttgacagttttttgaaatggcaggtagaagaagaactgcaggatctgctttctgagatcggaaaaacagtactttttgtatcccatagccgtgatgaagtatatcatttgtgtgatcgtatctgcgtattggaaaaaggtcacatggaaacaattcaggagaaaaaagagtttttcgcaaatccggtaacacaggcagcagcccgtatttccggatgtcgaaatatcgtgcctgcaaaacgcttgtctgcgcatcagctggaagttccggactggggtatctgttttgaactggaaaaagaaatttcggaagatatttctttcgttggtgtgcgtgcacattatattgaagtgtcagcggacttagaaccggcgaaaaacagttctattatgcagatggaccgtctgttagagcagcagtttgaatccgaactggttctgaaatacaatcaggatacgatgtcattgcgtattctgatggataaagaacaggcagagcagttggcagcgcacgaaaaattacgcgtgacaatacctgaacatgcactgctgttgctgaaagcgtaatactttttgtgactaaaaatttacattgtgaaaagaagatgtcagcttgcgctgaccagaatcacgcaccaagtctcacgtgcgttcgacttgaattagttgtgtaaatggcgaaatcaaggacggggttctgggggagcgatttagcgaacgactgagcttcacaaggttttgcgtgagtgggaggcgaccagcttttataggagccgagaatgagcgcgataaaaccgctgtgaagtgagggaagagagtgactagccgcacagaacccgtccttgatttcgctttataaacctaaattttcagccaatatccccaaaaccagaaaaactctttacaagcagcactttagtgtggtacagtgtagaaaactgtagaaggaagtaaaaagtgatgacaaaagcatgggaaaagaacattcgtaaagtagttccgtatgttccgggcgaacagccaaacaaggaacgcatgatcaaattaaatacaaatgaaaacccgtatccaccagccccgggtgttgctgaggctttaaaaaatctggatcctgaccgtttgagactgtatccagatccggcctgcatccgtctggtgaatgcgattgcaaaacaaaaaggtttaaaatcggagcaggtatttgtcggtgttggttccgatgacgttcttgccatgtgttttatgaccttttttaatggagaaaaaccgatcctgtttccggatattacctattctttttacgatgtgtgggcagaggaatttcgcattccgtatgagacacaaccgttagatgatgatttcaatatccgcaaagaggattattataaagaaaacggcggcgtgatcttcccgaatccgaatgccccgactggtgtggaagcatctcaggagatgatcgaggatatcttgcagcacaaccaggatgttatcgtgatcatcgatgaggcatatgtggactttggcgcagagaccgctttgccattactggaaaaatatgataatctgattgtggttcagacattttcaaaatcacgttccatggcgggaatgcgtatcggttacgcgatggcatcaccggagctggtcaaatacctgaatgatgtaaaatattctttcaattcctataccatggatcagactgcactggatcttggcgtggcatccatcaatgatcaggcatattttgaggagacattacataagatcattcagacgagagaacgtgtgaaactgcgtctgacagagcttggatttaccttccgtgattccaagagcaattttatttttgcatcacacaaaagctgtccggcagaggaactgtttgaaaaattaaaagaaaaagatatttacgtccgctattttaaaaagccgcggattgacaattatctgcgtatcaccatcggaaccgatgcagagatggatgaatttttgtcagaggtagaaaagtatctgaaagaaaccggtagattataaaaagccccaggcttgcataatattaagaaaatccttatatctttttctggaaaaatagtgtaaaataatgcagaatataagatgagatttttaggaggattgtatggaaagtctggtaacctggtttacaagtaccttaggtacacatatttcaagggaagcggttgtgtttattatttcactgttcccgattctggagctgagaggcggtattctggcatcttcattgctggatattacgatgtggaaaggaatcctgatcagcgcagttggaaacattattccgattccgtttattttattttttattaaaaagatatttgcagcattgaaaaaagcaaagctgttccgtccattggttgagaaaatggaaaacaaggcaatgaaaaaacgtgaccagatcgaaaaatatgagttctggggacttgttttattcgttggtattccacttccgggaacaggcgcatggacaggggctctggtagcatctctgattgatatggatatcaagaaagcgttcaaggcgattctggttggaatctgtctggcagctgtaattatgacattgatttcttacggcgtacttggtcacattatcaaataatcagaagcgatatagaaatgtagatctgttgtctcagtgcggatagaagtgaaagtatttgctctgattgagtgaataaaaagaagctgagtgttttgcctgcctaaataagacagacattatgattaacgtaagagggggaattttacgatggaatctatggaagcaagaatggtaaaactgtatgcgagaaacaacaatcatgtggcattgcatgccattccgggacactttgccacaagtcattcccatatcaatttttacattgatatgacaagcttgaaaacccgtgcgaacgaggcacaggaagttgcaaaaagtttggcgggagactatgt

SEQ ID NO: 13488 - DNA, 22315 bp, Unknown
  gut microbiota DNA sequence
gcaacacaaacctgcatgatacgatttatgtagttactccggagtacaatgcaaacaatcagctgattttccgtgataacacaattccagcgatcaaaggaaaaaatgtcattctgttgctggcaactactacgacaggattgaccgtgcgacgcagcctggaatgtgtacagtattatggaggaaccgtgcgcggtatttcttctattttcagtacggtaaaaaaagttggcggcatggaagtacattctgtatttaatgcagatgatgtgccgggctatcaggcgtttggcagagacgaatgcccatattgcaaaaaaggatttgccattgaagccatggtaaatggatttggctattcacaattgtaagaaacatagtaaaaaaagcagagtaagagatcagataaaatgagagaagaaaaatccttattttatctggtcttttgttttttcttcaggatagctgcatatcgtgaatcaggacttgacaaggcaaaaaatgttgtttatgatattttaagactttgaatgcaggttggaaagcaattgtgttcatgagcaagtagtgaaagtggattgcgaatatctgctttacaattttatagtaaaaaaggtagtgacaaagaggagtacgcgaaagatgcagtgacagggagagcggttcacagactggaagaccgtttgacaggcagtttgcggaaggtagctttggaaccggatgtctgaagccagagtaatatagggaacttgttccagctatggaagaaagcggtttaatagaaccgggaatgagatggcagatatattatatggtgcgtaggaaatctcgggtgattcccgttaatcaatcgtagagatttcatcttcatctgagttggattccaaacttttattaagtaatgaaatggtagttcttccatttcagtggagttcaaaaagagacaggtgagataaaatgaaggtggtaccgcgtagattcgcccttcacatgtgttgtgcatgtggagggctttttaattcatatgaaaaggtgtatttgtatgataacgggtacatttttgttaggttacagcatgtaagcggaagattttccgtttggctatttttacaaagagaattcatgttttggaaggagagacagaatgaaggaattagcaaagacctatgatccgaaagggatcgaagaccgtctttaccagaaatgggaagacaataaatattttcatgcagaagtagacagaagtaagaaaccgtttaccattgttatgccgccgccaaatatcaccggtcagctgcacatgggacatgctctggacaacaccatgcaggatatcctgatccgttacaagagaatgcagggctattccgcattatggcagccgggtactgaccatgcagccatcgcaacagaggttaaggttatcaacagcctgaaagacaaaggtatcaacaaagcagatttaacccgtgatgagtttctgaaatacgcatgggactggaaagaagagtacggcggacgtatcgtaaaacagttaaagaaaatgggatcttccgctgactgggacagagagcgttttaccatggatgagggatgctccgaggcagtcaaagaagtatttatccgtctgtttgacaaaggatatatttacaaaggttcccgtatcatcaactggtgtccggtctgcaagacttctatttccgatgcagaggtagagcacgtagagcagacaggtcatttctggcatatcaaatacccgatcattggcgaggaaggcagattcgtagagatcgcaaccacacgtccggagacaatgcttggtgatacagccgtagccgtaaacccggatgacgagcgttacacagacatcatcggtaaaaaattactgcttccgatcgtaaaccgcgagatcccggttattgctgatccgtatgtagacaaagagttcggaactggctgcgtaaaaatcacaccggcacacgacccgaacgattttgaggtaggaaaacgccacaacctggaagagatcaacattttaaatgacgatgcaaccatcaacgcaaacggcggtatttacgaaggtatggaccgttacgaggcaagaaaagccatcgttgataaattagacgagatgggactgcttgtaaaagtagttgagcacgttcacaacgtaggtactcatgacagatgcaagacaaccgttgagccaatgatcaaaccgcagtggtttgtaaaaatggaagaaatggcaaaaccggcgattgatgcattacagtccggcagactgaaatttgttccggaaagcttcggaaagacttatatgcactggcttgagggcatccgtgactggtgtatttccagacagctctggtggggacacagaatcccggcttactactgtgacgagtgcggcgagatggttgtttcccgcgaaatgccggagaaatgcccgaaatgcggttgcacacatttaaaacaggatgaggatacactggatacctggttttcctccgcactgtggccattctccacacttggctggccaaacaaaacagaagaactggattacttctatccgacagatgtacttgttaccggatatgatatcatctttttctgggttattcgtatggtattctctgcgttagagcagaccggaacagagccgttccataccgtactgattcacggactggtgcgcgattctcagggacgtaagatgagtaaatcccttggaaacggtattgatccgttagaggttattgacaaatacggtgcagatgccctgcgtctgacactgatcactggtaacgcacctggaaacgatatgcgtttctactgggagcgtgtagagtccagccgtaactttgcaaacaaagtttggaacgcatcccgtttcattatgatgaaccttggcgatgagcagccgatcaaaccggaagatgcagatctgctgccggttgataaatggattttatccaaagtaaatactctggcaaaagacgtaacagagaacatggataaatatgagctgggaatcgcagttcagaaagtatatgacttcatctgggaagagttctgtgactggtatatcgagattgcaaaagtacgtctgtacaagaaagaagaggatccgaaagctgcaaatacagcactctgggttctgaaaaccgtactgaccaacgcattaaagatgctacatccgtacatgccgttcatcacagaggagatcttctgcacactttgtccggaagaggagaccatcatgcttgctccgtggccggaatacacagaagagtggaattttgcaaaagaagaagctgatgtggagaccatcaaagtactggttaagggtatccgaaacattcgttctgagatgaacgttccaccaagccgcaaagcaaaatatttcatcgtatccccggatgagaacctgcgtgagctgtttgcttctcacaaagacatttacagccagttaatctccgcaaatgagatcgacgtacaggcagacaaagccggaatcccggaggatgccgtatccgttgttattccgaatgccgttgtatacattccattagaggagctggtagacatggcaaaagagcgggaacgtctggagaaagagaaagcaaaacttgcaaaagagctggcgcgttccaacggtatgctgaacaatgagaaattcttaagcaaagcacctcaggcaaaagttgacgaggagaaagcaaaacttgagaaatacaaacagatgatggaagacgtagaaaatcgtctggcacagttaaaataatatgagtgaaaacatgaaacaagcggtggaattcctgtacgggattccgaagtttaccaaaaaacacagccttgcacacacgaaacatttcatggagctgcttggcaatccgggtaatcactgcaaagtcattcatgtggcaggaagtaatggtaaaggaagcgtttgctgcttcctttaccatatgttgctttctgagggaaaaaccgtgggattgtttacatccccgcatctgatggatgtgcgggagcgttttcagttaaacggtgatctttgcagcgaagaacagtttctgtctgcctatgcccgggtaaaaaagacagcagaggaactggatcagaaaggtctgggctatccgacatttttcgagtttattttcgccatgggtatggtactctttgcggaggcgcaggtggagtatgttgttctggaaacagggcttggcggcagattggatgcgaccaacagttttgccgatccggtgttaagcattatcacctccatcagtctggagcatacagaaatccttggggataccatcgcacagattgccggggaaaaagcaggtattatcaagccgggcgttccggtagtttttgatgccaatgatccggaagcttccgcagtgatccgggcgcatgcaggcgaaatgcacagtccatgcactgcactggagaaaaaaatgttccagattctggaatttaagaataattttattgatttttccctttcaactgcgtatgataaggaaacaagatggacgattccgggagccgcagaataccaggtggaaaatgcagcgctggcgattcttgcaatgcggatcttgcagcagcagtatccagaggaagttgccggtgaaaatgccgaagaacagcttcatgcaggcatgaaagaggcgttctggcagggtagaatgcaggaaatagaaccggagatttattttgacggggcgcataacacctctggaataggaatgtttaccgaagcagtaaatcgactgactgccaaagatacctatcgtccacttctgctgttttccatggtaaaagaaaaggattacagtacttcaatcgatatgctgacagcagatatttcctgggaggagatggcagtcaccacgattcccaatgagcgtggcatatcttttgaaaaattagagaaactattcgaagaagatacagacagaccggtgacggggtatgccgattaccgggaggcgttcagggcaatgaaagagaagaagaagccggggcagaaatttttctgtacaggctccctctatttcataggtgcattgatggaagtatggaaggagaactgtgatgattgattttgaggaagaattaaagaaatttgaaccgagtatggagatcgaagaagcggaagattctatttataaccgcgatctgaccgatatgatggatattttacaggaaatgctgaaagaaagcagaagataggaggagacagatgaactgttattactgtggtgctcatctggattctatgggtacctgtccgagctgtgaagcagatgtcagagtctggaaaaagattgtaagcatttccaataagctgtacaatgacggactggagtgcgctcaggcacgggatctgaccggggcagtggaatatctgaagatgagtcttcgttataataaaatgaatattcaggcgcgaaacctgcttggactggtttattttgagatgggcgagatcgtaaaggcactgagcgagtggatcatcagtaagagtatgcagggggaggacaatcctgcaaatgattacctgactgatatccagaaaagctcagcgagattggataccatgtcccagacggtgaaaaaatttaaccagtcactgacttactgcaaagagggcaatacagatctggcactgatccagatgaaaaaagtacttgccctgaatccgaagcttgtaaaaggacatcagctgctggctttgctatatatgaaggaagaacgttatgacctggcattgcgtgcattaaaaaatgcaaaaaaaatcgatgccggtgatccaaatacgatgcgttacgaaaaagaatgcagagcgcatctgactgcaaacggcaaagtaaaaccgaaagaaaaagatacggtaagttatcagagcggcaacgatctgatcattcgtccggcaaaatttacggataatacagctgttttatctgtgatcaacctgctggtgggagctgccatcggtatcgctgtggtatgtttcctgatcgtaccgggaatccggaaaaatgcaaattctaacacatcttctcagcttatcaaggcaaatgagaccattgccaccagagagcaaagcatcaagagtctggaagatgagatcgcaggtctgaagcagaccgtagaagatgcacagacagcgacaagttccgcggatcagaaaaatcagtcctacgaggaactgttaaatgcctatgtggcttacgcgtcagatgaccacgtaaaagcaggtgagacactggcgaacgtaaacagagatttgctcagtgaaaacgcacagcagatttacgataatatgctgacagacgtacagagtgcaatgatggaagccgatatgaacgaagcgatgaatctgtatgagcagaaagattatagcggagccatcacaaagctggagtccatcgtacagtccgacgaaggatatcaggaaggtaaggcagcgtactatctggcatttgcgtataactatcagaacgatgagagcaatgcattgaaatggttccagattgcaagaaataaaacaaattcctccagtgtacgcaacacctgtaaggaaatgatcgacgatatgcagagccgtggaattaccgttccgggtgaaagcggaactacggataatcagtccgatacgtcagacggagatacctctggcgacaactcagataataatgactaacagatattctggttatgaagtgagatcatctcagtctgagttgagactcccacttctgcaagtggtgagtagtaacaagtatttctcagtgggagttcaatctccgactgagataaatgctccgcgagggcgcacattgtctggaagacaatggttttgcgccgaccggaacggagtgtagagtgcagtgattctgaaaagaagatgtcagcttgcgctgaccagaatcacgcaccaagtctcacgtgcgttcgacttgaataatctgattttaatgaaaattaaataagtactaaaaaagtagcaatatacggaagagaacaaaggagacatacaaatgttttcctaagacacatgaaatggtgtagaaatctttttctgtatattgcttttttgttgtgtaaatggcagcgtgttttttacctcagctgccttaaaaaagaaaataaaaggagccacaaaaacatgaactgtgaatatcagatcaaaggaaatacccttcgcatctacatcccgaaggagttagaccaccatatttccgacagtctgcgggaagaagccgacctgctgacagaagcctattttatccggagtattatcttcgatttttcccgtaccgaatggatggacagttccggcatcggcgtcatcttaggacggtacaaaaatatgaaattctccggcggaaccgttcgggcagaacatttaaacgaacgaatgtataaaatttttcatatgtcagggttggatgaactgattgcagaggaaggagagcaggagtgatggaacagagaaaacaggaagaatatgcagaagaaaactggatgcagatcacatttgcggcaaaatctgaaaatgagggatttgccagaaccgcggtggcagcatttgtcagcagtcttgatccgaccattgaggagttggcagacatcaagacggcagtatccgaagcggtcacaaattgtatcattcacggttacaaccagcgcggcggcacgatctggatggcgggaaccctgaccggtcgtaaattgcgggtgtccattaccgatgaaggcagaggcatcaaagatatcaagcaggcgttggaaccgctttttaccacgcgaccggatctagagcgttccggcatgggattttccttcatggaagcctttatggataccgtggaagtggaatccacaccgggcaaaggaacccgggtttctatggaaaaagaaatcaggtagttacatatggagcaggtgttggagtatattaagcgcgcgcaccagggggataaagcagcacgggatctgctggtacagaacaatctgggactggtctggagcattgtccggcgattttccaaccgcggatacgatccggaggatctgtttcaggtggggagcatcggtctgttaaaagcaatcgaccgttttgatacggattatgaggtaaaattttccacttatgccgtaccgctgatcatcggagaaatccgcagatatctgagagacgatggcatgctgaaagtcagtcgtaccttaaaagaagctgcctggaaagtcagtcaggcggtgacggaatggcagaatgagtacggtcgtgatccgacattggaggaactttccgggaaaaccggaatgtcatctgaggagatcgtgcagtcgctggaagccaatacagatgtggattcccttcaccgaccggttcccggaaatgagggaaaggagatcacacttggcgaacagatccgggatcagaaaaatctgatcgagcagcaggtcaaccacatttttctggagcaattgctggatacattagagccggaagaacgtcagctgcttcagcttcgttatgtagaagaaaagacacagtcggaggtggcaaaactgcttggaacgacgcaggttcagatttccagacgggaaaagaaactgcttgcgaaattgcggaatacggtataaaatgcgatacagtccttcttattgataaaaaagtttcgataaagttttgggaacaagcttgcataaaagaagtgaatgtaataaaatatgcgttagctcaagctaatcattaaaattgtatcaataagagaaaaagcatatacggaggataccaatagatgaaaaaaagaaaactgttaatcgcacttttgtgtggagccttagtatgtctgccgctggcaggttgtaacaataaaaacggtgcgtcaggaacggacagctctgtacagagtgaagtttcagaagatgccggagagcagaacagctcagacagcagtcaggaatatacaagcgatgtgtttgccatggatacttatatgacactgaccgcttatggcgaaaatgcacaggaagcagtggaagcgggtattgctgagattcagcgtctggacgatctgctgtctaccggaaaagacaccagtgaagtcgcacagatcaacgcaaacggcggtggcgtactttctgaggataccgattatctggtaaaacgtgccctggatatttatcagagtacaaacggagcctttgatatcagcatttatccggtgatgcagctttggggatttaccacaggaaattttgcagtaccgagtgagtctgatctggcagcaaaacttgcgctggtagatgcgggaaaaatcatattaagcgaagaaaacggacagacaagcatcagtctcccggaaggcatggagatcgatctgggcggaattgccaagggttatacgtccggaagagttatggatgtgatgaaaagctatggcatcaagagtgcagttattaaccttggcggaaacgcacacgtccttggaaataaaaccgatggcagtcagtggaaagtcggcattcaggatccggaggatgaaaacggatatctgggcggcgtgagcgtcacagacaaagctattatcacttccggtggttatgagcgctactttgtagatgaggataccggtgtgaaatatcaccatatcatcgatccgaaaaccggttattctgccaacaacggtctgatctctgtgacgatcgtcagtgcggatagcacactggcagacggattatccacatctctgtttgtacttggcacagaggatgccattacttattgtgaggaacattgtgcagaggacggatttgacgccatcatggaagatgaggacggcaaactttatatcacagacggcatttatgacgattttatcaatatgaacaataacaaaaatattgaaaaaatccagacaaactagagacagggcggtaacgatatgaaaaaacaaaagatatctgcaaaaacagtagctctgatggcaatgatgatcgcacttgccatgatcttcagttatgtagaaaccatgatcccgatcaacttcgggattccgggcgtaaaactgggacttgccaatctggtcattgtggcggcaatctacctttttggtgggaagcaggcatttttgatttccattgtgcgaatcttcttaagcggattcatgtttggaaatctggcatccatcatgtacagtctggcgggcggtctgctcagtctggcagccatgctccttttgaaaaaaacagacaagctgtcgatccttgcggtcagtgtcatgggtggtatctgccacaacattggacagttgatcgtggcaatgcttgtggtggaaaatctgaagctgattttttatgttccggtacttctgatttccggatttcttaccggtctgctgatcggtatcgtatgcagagtgattcttccagcagtcaaacgggcatacgaatctgcaagataacaagctgtttgcctggcgcttagtcaaaggatattcgcaatccgccttcgctacttgctcataaccaaatagctgcttcgtagcttatcagaaggggcttgcacccctcctgatacaagcaagtccctacccctgcttattgcttttcgcaattgaagcaggggacttccttgattttgttaaaaacgtatatgcaggtaaatagattccaactgtaagcaggatttttaccaggacttaccagaactattgagaaaaaacggaggaaattgcacaaaaattctcaatagtgacagttattgagaaaatagagaaaaatgatttgatttaaaaaaaaagtgatgctatgataacgtgcgttagaagatgctaatgtacgatatcatggcattttttatttgcgagaatgtgtgaaagcacattttcctgtagtctttgccggaaaaatccggtaaagcacaaagtgtttccaacaatcatgtgaaagcaatgttataaaaggtcaggagagagactatgaagaaagataagaagacggaagttgatccggaaaatctggatccgaagaatcagaaaaagaagataaacttaagtaccatggcgccggcattatccgcgctgctggtagtagcctgcgcaggcgcatccgtggcagcttactcaccaaaagtatatgcggtacagaaaccatccccaaagacagagagcgctgatacaactgcggaggatactgcagaagaaacggctctggaaggtcaggtatttgatctgccggatggcatttatgaaggaaccggaaccggttttgcaggaaagattacagttgcggtagagattaaagataaaaaaattgttgcgattacggttctgaatgtagaagcggacgatgcagcatttttcaatcgtgccaaaggagtcattgaccggatcattcagtcccagaatttggatgtggatgtcgtatccggagcaacttacagttccagaggtatcatcagtgcggttaaaaatgctctgaccggtgagaaggacagtggaaaaacagcggaaaatccgggaaaaggagaaggttctacaactgtggcagaagttgcagatgcagcagcttacaaagatggaacctattacggaagtgcgaccggttttgcaggtccgatcaaagtaaaagttgtgatcagcggtggtaagattgcgtccatcgagatcgtatccacttctgacggcagcagctatatttccaaagcatctgccattaccgggaaaatcgtatcttctcagagcacgaatgtagatactgtgtccggagcaacttacagttccgtaggtatcatcaatgcggttcgtaacgcattggcacaggcggcagtagacggaagcacagtaccggtatccacagaaaatacagagcagaacaatcagcagaatcagtctgcgccgacaccatctgtatccggaaatttcccgtatccggatggaacttattatggaaccgcagaaggatatctgggagatgtcaaggtagctatcgtgctgaaaaatcatacgatccagtccgtacagattctggaaaatgaagacgatgcggcatttttcaatcgtgcccgtgcagtggtcaataatattgtgaaaaatcagacaacaggtgtagatgttgtgtccggagcaacctacagctctaacggtatcatcaacgcggttaaagcagcgctggagtctgcaaaagcagtagcaaatccgtctaacggaaataattccaataatggaaaccagaataataacaattccggaaataacaatggcaataccggaaacaacaataacagtaataacaacggaagtacagagaagccggatgattccaacacaaatgctccgacttattatgccgatggcagttatacagtgactgtaaagtgtgggccagatgaaagtgaggattttgatgcttacaatctgactgctacgattactgtaaaaggcgataagattacggcaatcagtaatgtttctggtgatggagacagcagcaatgacagatacattaactgggctgcaaatggaagatccaataatgttggtattattagccagatcatcggtcttgcaaccattgatatgtcaaaagaaaatgcagaaacaaccatgaatgaagcgattgcgaatgtggatgtggtttccagagcaacctgttcttcccaagcattgaaagatgcatgcaaagaagccttaaatcaggcgcgtgcaaaatttttggagcagaaagatgatcagaaaaatctggcagatgtgaaaatgccggatggaaccgatgaaactggtaacgcagatacagaactgacagacccggaaaacgatccgcaggaggcagcacaggaacagctcctggagacagaataagtaaaggatagaaacaggaaaatatgaaaaagtttatgattcgtattgtcaatgtatgtatgatcgtagcggcattgtttggctacaatcacgttacgttggcgcatgaaaagattgatgcggaagcaaaagcagaagcagaccgtcagagtgcggagcttgctgcggaagctggcgtaaacggcggcaattatacagatggaacatatcagggaacggccacaggatttggcggtgatattaccgtggaagtaaccattgcagatggcaagatcacagacgtagagattttgtctgcagaaaaagaggatagtgcttatctgaccatggcaaaagatattattccggaaatcatagacgcacagagtgcagatgtagatacgatcagtggcgcaacgttcagctccaccggtatcaaaaatgcgacggcacaggcgcttgagaaaggcggtaccaattagtgaaacaaccgaataaaaagaccatgaaaaaaattcatgtgtgggtgcgggcagtgatacagttattgtattttctgtttattccgtctgcctatacagcggcgtttaacggcgtcaaatacatttttacccagatgggagcaaaaacacatctggaggtgacttcctttgtggcagcattgatcgtgctgtgtgtatacacaatcgtgtttggcagattcttctgtggatttgcctgtgctttcggaagtttgggtgatgcagtgcgggcactttatgtgtttatctgcaaaaaactgaaaaagaaaccgatcaccatgaaagcggcagttgtgaaaaaactgcaggtagtgaaatatttcgtgttggcgatcattgctgtgacatgttttacgggtgtatacagcaaggcgaagggattcagtccgtgggatgtattttccatgctgcatgcgcgtaatttcaaattgggtggctatacccttggcgtggtacttctggtgctgatcgttattggcatgtgctttcaggaacggtttttctgccgtgttctgtgcccgatgggagcagtattttctattctgccggtattgccgttttctactctgcgcagagaccggtctgagtgtatcaagggatgccgggcttgtacgatgaagtgtccgtcggatattgagctggcgccggatacggcaccggaattgtcaggagattgttttcagtgtcagaagtgtattgatacctgcccgaagggaaatatacatacggggattcgtgcactgaaaggcaatgagatctggtatacggtgcttcgtgccgtaattttactgatactgttcaagtttgtcggtttataaataaaagaaaaatggagaaatttatctcactcactagacgttcactaccttcgtttcacggcggtttcatcgcgctcgttctcgactcctataaaagctggtcgtctcccactcgcgcaaaaccttgtgaaactcagtcgttcgcttaatcgttcgttgagataaatttctccatttttcatttacgttttgaagaaccgatagtctatattttaaacaaaaaacgaaaatgagaaagaaattcaataacgaaaaagttgaaaaaagctgttgacaaatccaaagttgtaatgatatagtaactgtcgttaggaaacactaataaaacacaaaaccaaatattgaaattcacggtacagagtaacatctggtcgtggacttggtagagacttctcccgcatgcggcacaggacgcatacatgggtggagtctatttttttgcaataattcggagccaggcaaatttacaagggcaggtacgaatcatcgcaaagaaggaaaaggaggataacatgaagaagagaagagagtttctgacaaaagcattagctggagccatggtggtagcaatgacagccggaacaatgccggtgagcgctcttgcagcatccagtgtaacaaagacaaaagatggcacttacacaggaaccgctacggttgtagcagatgaggatttcacaaattatccgatcagtgtagatgtgaccgttgccgatggcaaaatcacagatgtagctttttcagaggaaaatcagttttatgtagatggtgcagatagcaccgaaataaagaaaaataaaaagctctcaacggaggcgatgacagaattaaaagataaaattatcgcccagaatggtactactggtgttgacgcaaaatctggagcaacatgcacatcaaaggcaattcttacagcagtagatagtgctattaacgaagcaccagaagcagttaaagtaaaatacgtgaccatgaacgtaccgtacacagacttttacgcagcttacaatctgacagacaaagctgtttggcaggttgagaatggtttagacgctgtttccacagcgacaaccaataagtttaaaggcacaacaggtcttgcaaaaggaacctacaacaacggcaaatatatcatgggcgtgaccatggcagttgcagttccggaagagacttacgaagcactgaaagcagaaaatctgacagcgaatgacaattattacatgacagatttggataccgctccggcagcattcagcaccatgacagtcaatgcagatggaacatacagcttcagcaaacttcaggaagcatctgtttccggcaactatatcacagttggagaacttgacctgaatgcaggttacggtgattatcaggttacactagacggacttggaacagacggcactttaaaaacaggtgagaatgagacaacaccatatgccctttacggagcaatcctgaataccacagagggaaaaacttatggaatgacttgtctggaaaatctgtggcttggaacaaagagaccgaatgtggagatcgcgtggtccatcaaagaaggtcagggcctgaaacgtggacatggcgcaggcgatgagttttatcagttcagcgatatgaatggtgcaactttaaagagcatcacattgattacagatcttggaactattgaagtgccttgcggtgagaacggtctggaactgacaaaatattatgcaggtgatctgagtaatttacagtatgccatcgataatgattctacagagctgagcatcagtggtattccatctgatttggaaaatgtgaaaatttctgtatccggcggtttagcaacaaacgctgagatcaaagacggaaaagtaacattgagtaaagcaccggaagcaggaacaacctacacactgattatcagcagttcaaattatccggaaattacaagaacaatgtccacaccaattgtagcagatcaggtgacagagcttcagaaatgggtagacaaagcaaaagcaacaaacggatatgagaacaatgcggatttgaaagagcatgtagcagaagcggaagaaatgatcgcaaataaagaagcggcatctgcagacgcagcagaactgatcagtgagctgacagaaaaagtcaaagcaacttactcaactgtggaaatggaagcgactgtaaaaggtaattaccttggaatcgcattgaaaaatgtatctctggaagacctggagaatccgacttatacattatctgttagccagggaagaggaagtgtaacggtagcagaaggcaagttagatgcactggatcttacactggaaaaagaactgacagcaggaacggaatatacactgaccatcgtaagtgataattatcaggatgcacagatcaaagttacagcagaagaaacagaagcagattacagtaaagtatacgatgcaattgacgcaattccggatgatctgagtgtttacacagatgagagtgttgcaaacttgcagagagtactggaaacggttgattacagtaagaaagcaagtcagcagtcagaggtagatgcttatgcaaatgcaatcatagaagcaacagcaaaacttgagaaaaaagcagtaactcctgtagctccgacacatgcagacggacttgcaaatgagaaagcttctgatggaaactggtactattatgtaaatggaaaagttgcaacaaatgtgacaactgttgctaagaacgtaaacggctggtactatgtaaagaatggaaaagtagatttctcagcaaatactgtagcaaaaaatgagaatggctggtggattatccgcggtggaaaagtagacttctcagcaaataccgtagcgaagaatgagaacggctggtggaagatcacaaacggtaaagtggatttcggttacacaggcattgcaaaaaatgagaatggctggtggagaatcgtaaacggaaaagtagatttcaactgcaacagcgttgagaaaaacgagaacggctggtggtacatccgcggcggaaaagtagatttttcctacacaggagtagcaaaaaatgcaaatggctggtggagaattgaaaacggaaaagtaaacttcaactttaccggtatcgcaagcaaccagaacggatcctggtatttacagaacggaaaagtaaatttcaactacaacggaaaagtaaaatataatcataaaacttatacgatccgtggaggaaaagtcgtaaaataacaaaaagatattatggtaaattacagacagattttcagttgcttttcacttgagcaagtagcgaaagcggattgcgaatgtccgctttacttctgaaatttatcaaaaatgaaagagagtaaatcttaaaacagggatttactctctttttgatgttaagagaaaagattatcaataaacatggttaatgagaaaagacgttcgatattaatgagaaagtatttcaataaaagggaatgtgaaaaaagtgtgttgacgttaactgaaactaatgctatcataaccgccgttagatagtgctaatggaaattgttcattgctaagatgagttagaggaaaaagtttgttggtacaatcggatgatatttttgattttgaaaatgaaaaatataaggaggaatttatgagaagaaagaaactttcaatgaaagtagtagcagcaattcttgcagcagctacatttatgagcacctacccgactgctgcatttgcagtaaccaaaagtcaggtagcagcagatggcgtaaataatgcaactacacatgtagaatcagatgacgagtggaacagttatgatgtgactgtcggagtgactgttgaggacggaaaatttaaagaatttctggtaactccgacgaatggatatgaggcatcgggagattttggaagtaaaacatattttgaaaaagcagtgaatggaacaacaaaaaaaccggatatgggaatcaaagctctggttggacagccggcaacacaggaaagtattgataactggtttactgcaaatggatatgatacaaaatcaggtgctacaattacaagaacagcagtaaaagatgctgcaaaagaggctctttctaaatttgaagaagcaaagaaagaggatgtgaaacaggaagcttatgttctgatgaacattccatatgcagcattttatgcagcagagggtgattccgatgtagatgcagtttcatccgcaacaaagatgaaaaccagagcatccctggcagccggttcctatcatgtaaacaatgacggatcagatatcagtggtatcacattccctgtaaaagtaagtgatctggcagcattgacaggaaaatatacgcagattacagatgagagtaaagttgagattactacaagtatcaagggaaaagagtctaccacaacttatgtgggaaaagatgcattgtttgaaagtgcagattactcctattatgtactcagcgaagctccatcttactataaagagcttactgtaaacaaggacggaacactcagctttggagcagtgaagacatcttctgcaacaacgttagataatgcaaacggtacattatctacttctacgaaatatggtgattatcagcttgatatcgaaggacttccgaaaaatatcaatacggtatacggtgtcacaatcagcacaaaagagggtgacagctacggattacgtcatgtggagaatatctggaaaaaaacagaactcgcatggagtacgggatttgtaacagagtcacatggctgccagctttcttatgcagactatgtatccatgatgggacagactatcaataatgttacttattacacagatgccggtgtatataacattccaatgaaccagtatgttccggtaaaatttgcaaatacagtagcagttgagaatgcttctgctgatgcaggaaagacaactgtagctattacaggattgccatctgattatgatgcggtatacagtgtggacggactgaataatgtttctgtaaaagatggtatattaagctttgacaagagcgcagcagtaggggagtatactttaaagattacagacaagagtggtaaatacgcagatctttctgcaacatttgaactgacaacagacaaagcagtagcagcctatgacaatgcaagtgacagtcttgttgctgcaaaagatgcagcagcagatgatctgagtgcttacattaaaaatattaaaagtgtcaatgtaaatggcaaagattatgctgcatccggaaaaaaatctgttacgatcatcaacaaagacggctctttaaatgagtcagcaactccgtttaaagatgcaaagccgggagatgagtttactgtttctgtaaaagcaaccggatatgcaaatgatttcacatttacttatgtagttccggaatactcctatgtatatgcttctctttcttatgctgagtactatgcagcagagaatgttcagaatgcaggatctacattatcttctgatacaatggatacaaacggtgagtatgataaaggcgcatttgacgttgttacccgtgcgacagcaaatcacggtctccacagaggaagtttccaacaggatgtcgtgatctatgacacagatggaaatgagtatgagccagtttcctggacagatgcaaataccgcaattttaaaagatggaaagacacttgtaaaagcatctgacagaaaaacaggtattactacattaacagtagatggaaaaaatgctacatacgatcattatgtgatcaaaggaatcaaatatgttccggtaaaagtaaaaacaaaaaatctggaagcgttcaaaaaagcttacagtgtagtagaaaatggtgaaaaactgtctggcggatattctgagaataatctgaagagttatgaagcagttgcagctgtagatgccaatacaaacggcctgaaaactgtttccatgagtgcagacggaagcttcagttttggagcagcagcaattggcacaacatccggattgaaagatacggaattaaagacagcagacacagctaaaatgggtgtagaagttgtaagcagcagcaaatttggtgattttctccgtgtggatctgactgagaactatggtgatctcggagcagcaatgcagtctgtagagtggacatattatggcaatggcgataaagttattgcaacatatggaacaaaatttgcagcggataactggatgcataaaatgatgggaattcagctcggactgacagattccttaagatgccagcttccggaaggaactgacggaacaggaaaatgggtagtgaccattcatgcacttggttatgcagatacaaatgtagaagtaaatgtgactgcagatgatattcatactgcaacaccggtaagtgacacaagcaaactggaagcagcaatcaaagcagcagaagctttgaataaagacgattacacagaaaaaacctggagtgatctggaggcagaactgaaagaagcacaggacgatcttgcaaatgctgcaaaaggcaaaacaagtcaggaaagtgtagatgagtctacagcacatttaaatgcagctattgcagctcttgaaaaagcaaacaaatttacaggtcttgcaaactccaaagcagctgacggaaactggtactactacgtaaatggcgaaattgctacaaacgttacaaccgtcgctaagaacgtaaacggctggtattatgtaaagaatggaaaagttgattttacctataacggatttgcttcaaatgaaaatggaaactggtatgtaaaaaatggttgcgtaaaatttgatgtaaatgatgtggttaaagatacaacaggtgctatcggtgcaaaaggaacttggtactatgtaacaggaagtaaagtaacaaatgcaaatactgtagcaaagaacgctaatggctggtggagaatcgtaaacggtaaagtagatttcaactgcaacagcgtagagaaaaacgagaacggctggtggtacatccgcggcggtaaagtagatttctcctatacgggagtagcaaaaaacacaaacggctggtggagaatcgttaatggtaaagttgatttcaactgcaacagcgtagagaaaaatgcaaacggctggtggtacatccgtggtggtaaagtagacttctcctacacaggagtagcaaaaaatgcaaacggctggtggagaattgaaaacggtaaagtaaacttcaatttcaacggtattgcacagaacagcaacggctggtggtacatcaaaggtggtaaagtagatttctcttacaacggaactgttaaatcaaacggtaaaacttataaagttgtaaatggaaaagtaagagtataataagcgtctttacttcctaagcaaatgaattaaaaatccggtttcgggaatttcccggagccgaattttttgtgtaaattagtaaaaagttgcttataacacttgacgtacagtttcctgtacaatataatataagtacagaaaaccgtacggaggtgaaacattatgttagctgttaattatacaaatttaagggataacatgaaaagttacatggatcagataactgacgattatgaaacaatgattgttacaagaaaaaataacaaaaatgttgtgatgatgtcagaggaagcatataacaatctgatggaaaatatttatgttatgggaaataaggctaattatgactggttgatggagtctaaggctcagctggaaggaaagaaatttttatctcatgagctgtctgaggtagaagagaatgaataaagtatttacagataatggatgggcagattatgtttactggcagaccgaggacagaaagaccttgaaaaaaattaataatctgattaaagatattgatcggaatggaaatgaaggaattggtaagccagaaccattgacaggaacattatctggatattggagtagaagaatcaatgataaggatcgtctgatttataagattgatgatacaacgatttatattttggcttgcagatatcattatagtgataagtaaatgcgtcagcagattaaaaatctgctgacgtgacgaccggggctttttatggatatt

SEQ ID NO: 13489 - DNA, 296 bp, Unknown
  gut microbiota DNA sequence
cagatattttaaaaattgtgaaataaaacttattgtatttcggatatttgataaagacagatcagatatcccaactaaatattttgcgtataattgtaaataccaacgattttctttttcgtaaatattaataaatgaaagacttttaacaggtgaactggcattgattcttgatttatcaaactgaaacctatccatataccagatacatgcttgccaatttatctctgaatctgttagaaataacgttcttctcgcaaactcaacaatcttagaagcctgtttttttataattt

SEQ ID NO: 13490 - DNA, 9461 bp, Unknown
  gut microbiota DNA sequence
ttccgcttatacaaaattctgtcgtacgctaaattgccggttccagatggatgctccgatttcttcgtaactgaaatgacgccagaagataatttttcctaagcaagcgattattagctgcgaaggtaaaattaacttctggcgtcttcaaaaccccaaaattaaattttaaagatttttcacggtcgcgatgtcgatcatcgtcatctgatcatttgctgtctcaagactgagtgccagcgcatttgccgtatccatagatgtcaggcagtgaacacctgtctcaatggcatttcgacgaatgaggaatccgtctctggatttgtcacgtccctgtgtcggtgtatcgataacaaggtcgatcttgtgaccaaggatcagatccataacgtttggtgattcctgagaaattttattaacacggcgtgcgtttacgccatgatcctgcaggtattttgcagtacttcttgtagcataaatagtgtaaccaagtgcttcgaaacgttttgcaacaccgactgcctccggtttgtccgcatccttgactgtcatgatcatctgtttgtacttcggaagctgaatgccagcgccgataaatgctttgtacaatgcttcgttgaagttctttgcgataccaaggcactcaccggtggatttcatttccggtccaaggctgatctcagctccacgcagtttctcgaaggagaatactggcatcttgatggcaatgtaatctgcctccggtgccagtcccggctcataacccatgcctttgatggtctcaccaaggattacttttgttgccagatctacgatcgggatacctgttactttactgatatatggtacggttctggaagaacgcgggttcacttcgatgacatatacttcctcgttcatggcgatgaactgaatgttgatcagtcctacgacatgaagtgctcttgccagacgttttgtatactctacgatggtctcttttacatgatcgctgatggtcggtgccggatatacggaaatactgtctccggaatgtacacctgtacgctcgatatgctccatgatacccgggatcaggatatctgtgccgtcgcataccgcatcaacctcaatctctttacccatcaggtatttatcgatcagaatcgggtgatcctgtgcgatctggttgatggtatcgataaattctacgatctcatcatcattgaatgcaatgtgcatgccctgtccgccaagtacataggacggacgaaccagtaccggataaccgatgcgatttgctgctgcttttgcttcctgagcggtgtatacggtatcacctgctgctctcggaatacctgtctgctccagaatctcatcaaagagctcacggtcctcagctgcatcaacgtcttctgcttttgtaccaaggatcggcacgcccatcttcatcaggctctctgtcagtttgatggctgtctgtccaccgaactgtacaactgctccatccggtttttcgatgtttacgacgttctctacatcttccggtgtcagcggctcgaaatacagtttgtcagcaatatcaaagtcagtggaaactgtctctgggttgttgttgataatgattgtctcatatccggcttttgcgaaggaccatgtacaatgtacggagcagaagtcgaactcgataccctgtccgatacggatcggacctgaaccaagtaccagaacttttttcttctttgctgttccgtctgcttcgttttcaccatcaaagcaggaatagtaatatggtgttgttgcctcaaactctgcggcacaggtatcaaccatcttgaaggaagctgtgatgccgttttcgtaacgcatgtttttgatgtattcttcatcttttccggttaactgagcgatgactttatccgggaactcgatacgttttgcttcgcggagcagatcaacagtcagtgcctcgctgcgcagacgaccttccatctcaaccaaaattgcgattttatcaataaaccatttgtcgatctttgtgatgtcatggatcgtatcataagaaactccacgacggcatgcctcagcgatgacccagattcttctgtcatctaccactttcagacgctcgatcagtttatcataggaaagtgatacatactcatctgtaacaaggctgtctacatgctgctccagggaacggatagctttcatcagcgcgccctcgaagtttgtgcagatactcataacctcaccagttgctttcatctgtgtggtcagagtacgttttgcagtgataaatttatcaaacggcagacgcgggatttttacaacacagtaatccagcatcggctcgaaacttgcgtaagtttttcctgtaatggcatttttgatctcatccagtgtgtaaccaagtgcaatctttgcagcaacttttgcgatcggatatccggttgctttggaagccagtgcagaagaacggcttactctcgggtttacctcgataacgcagtactcaaaggaatccggatttaacgcatactgtacgttacagccaccagtgatattcagctcgctgatgatatttaacgcagatgtacgcagcatctggtactctttgtcgcccagtgtctgggacggtgctactacgatggagtcaccggtatgaacaccaaccgggtcgatattctccatattacatactgtgatgcagtttccgttagcatcacgcattacttcgtactcaatctctttccatccggcgatgcagcgttcaaccagaacttctccgacacggctcagacgcagaccgttggtcaggatctcaaccagctcttcttcgttgtgggcgataccgccgccgcttccgcctaaggtaaaggccggacgcagtacaaccgggtaaccgatggtatttgtaaatttgataccatcttccactgtatttacaaccagggaagccgcacacggctcaccgattttttccatagtatctttgaaagcctgacgatcctccgcacggaaaattgtctcagctgtggtaccgatcagttttacaccgttttcctctaaaaatccggattctgccagctccataccaaggttcaaacctgcctgtccacccagagtcggaagtacgctgtccggtttttcttttaaaataatctgttttaacacatcgacagtcagcggctcaatgtatacctgatctgcgatctgtttatctgtcatgatggttgccgggttggagtttaccagacaaacttcaatgccttcctctttcagggaacggcatgcctgtgtacccgcataatcaaactcagctgcctgtccgataacgatcggaccggaaccgattactaatacttttttgatatctgatctctttggcattatttctgtcctcccatcatttcaataaacttgtcaaacaggtatccggaatcctgtggtccagggcatgcttccggatggaactgtacggtaaaaatattctttcctgtatacttgagtccctcgttggttccgtcgtttacatttgtaaatgcaggaactgcaactgccgggtcaagactttctgcatcaaccgcgtatccatggttctgggatgaaatgtatacacgacctgtttccagatcttttaccggatgattgccgcctctgtgtccatatttcaatttgtaggtatctgcgccggtagctaatgccatcaactgatgtcctaagcagatcgcaaaaatcggtacttcagaatcgtaaagttttttcacttctttgatgatatctgtgcaggctttcggatctccagggccgttagaaagcatgattccgtccgggttggaagcaaggatttcctcggctgttgtgtgtgccgggtagatcgtaacttcgcagccacgtttgtgcagggactgtgcaatgttgttctttgcaccgaagtccagcagtgctactttatagccgtctgctttcagcacttctttctcactgcaggtcaccttgtctaccacgtttcctgtattgtatacatgaagctgaggcagaatttcatcaagtttgtaattttcatcagtggtgatcatgccgttcatggttcctttttcacgcaggatctttgtcagtgctcgcgtatcaattcctgcaattccagggatgtcatgctctttcaggaaatcctgaatggttccctggcagcggaagttgctcggaattctggataactctcttacgatgtatccgtccggccatggctgtttggactccatgtccggtgtaattccataatttccaatcagcggataagtcattacgactgcctgtcccgcataggatgggtctgtcaaaacctccagataaccagtcatggaagtattgaagacgatctcactgatcacgctctttgtcgaaccaatgcttgttccggtaaatactgtaccgtcttccagaatcagaaatgctttcatttattcgcccgtcctttctcttttttacaatatacacttttaatatacaacattttaacatgtatttcctggcttgttgcaaaaaaaaagagggaattttctcttttcttgtatgtttatacattattcatgcataatattcatttttctgccatatatacaaattgtaggtattctatcacagtttttcctgcatttcaatactaacttttcagatacattcataatactttctaatcatattaatcagacatgattatttcatactgacttccacactataactttactcttattccaaagtatccaaatggaaatcttctactaaatctctttcttatcatacgctttaaaacagtatgcattttcttttataatcaacaacggcaagacccgactttattgccaggtcttgccgtcacttaattactcaattattgtttttccacccatgtatggctgtaatgctttcggaatatttacagttccgtctgcatttaagttgttctctaagaatgcgatcaacattcttggcggagcaactacggtattatttaatgtatgagccagatatttcttgccatcttttcctttgacacggatcttcagacgtcttgcctgagcgtcaccaaggttagagcagcttcctacctcaaaatatttcttctgacgtggagaccatgcctctacatcaacggattttactttcaggtcagcaagatcaccggaacagcactctaaggtacgaaccgggatatcaaggctacggaacaggtctacggtgttctgccataatttctcataccacatcatagaatcttccggtttgcagacaacgatcatttcctgtttttcaaactggtggatacggtatacacctctctcctcgataccatgagcacctttctctttacggaagcacggagaatagctggtcagagtcttcggcagctgatcctcatcgatcatagtatcgataaagcttccgatcatggaatgctcggaagtaccgatcagatacaggtcttcgccttcgatcttgtacatcatggcatccatctcgtcaaaactcataacgccggtaacaacgttgcttctgatcatgtatggcgggatgcagtatgtgaaaccgcggtcgatcataaagtcacgggcataagccagaactgcggagtgcagacgggcaatgtcacctttcagataataaaaaccgtttccggctacttttcttgcactgtcaaggtcgataccatcaaatttttccatgatttctgtatgatatggaatctcgaaatccggaacaaccggctcaccaaaacgctcaacttctacgttctcgctatcatcttttccaatcgggacagacggatcaatgatgttcggaatggtcatcatgatctttttgatcttctcctgaagctcgccttcctgtgcctcaagctctgtcagacgctctgcatctttggcaacctgctcttttaatgccatagcttcttcttttttgccctgccccatcagtgcaccaatctgtttggagacacggtttctgttggcacgcagatcgtcagcttcctgctgaacggctctggatgatgcatctaattcgattacttcgtcaaccagaccaagtttgtgatcctgaaatttatttttgatattctgttttacaatatccgggttttctcttaaaaacttaatgtcaatcatagcttcctcctgaggaaattttattctttcaaaagtatacactgattcacagcaatattcaagccttgttcatcgtgttcttgacgaaaatttgggggtataaagcgaaatcgaagcatcctttcagaatcgctagacgctcactaccttcatttcacttcggtttcatcgcgctcactctcaactccgataaaagctggtcgtttcccgttcgcgcaaaaccttgtgaaaatcagtcgttcactcaatcactgattctgaaaggatgcttcgatttcgctatttatacattttaaacgcagaataagcattcccccgtttcaagtgcgtagagcataaacggtgggtaagaggaatgcttatgtccgctttactctgcatgtgcaacacaatgttttttatacagtaactgcacatgcggcacgcagcgccgtcgtgtaaatggaacaaaaatgatacaaaaactccaatgcaaggcggtagattgattttcgttatcgaagcgagcatagcccgaccgcgtgagcgtgtttgaggctgctgtctctgcagccgagttcgcggaagcggtcggagataagcggcgcagcgcagatagaaaatcattcgtgcctgcattggagttttgtatcattttgttctttatcacacaagcaagatttattcgcggcgcaaagcatcgattggtttcagattcgccgccttataagatggcaataatccgaaaataattccaattcccatggagaatgctaccgcaatgatcgccgccggcacactgatcactaccggcatctcactgacttttgaaatgacctccgccaatatgatacccgcaaccacaccgataataccgccaagactggtcagtacggctgcctccgtcagaaactgtccaagaatatgacctttctttgctccgattgcttttttcagaccgatttcctgcgtacgctctgtcacggataccagcatgatattcataacaccgataccgccaactaacagagaaattcctgcgatccagatcagcatccggtttgtggactggctcagttcctgaatatcctgtgcctgcttcaacagatcctgtcctttgtactgaatagtagtgtcaggaactgcgaggtttgcattcagaatatcagctactgcctgacctgctgatgacatggaatctgtattcgttgcccgcaaaacgacgctctgcggttcatcatactgaaatacgatcggccaggttgtagacggaataaacactctgccgctgctgtcctgcatataagtatagtaatcatccatagagttaatcaccggttcaaagccatcttttttgtctgcaattccgataacgatgtacggctccccggatatttcgatggtttttccaatagcatcttctccctgaaacagagaggaggcacaatcctgatccaaaattgctacttttctgtattttgcatagtcgttgccgtcaaatccacgaccttcttttaccgcataactgcaggtatccagatagttctggtcgattcccatgacataaccgccggaaagagaggtatttccatagcatacggtatcgtaaccctgacggctggtataacgggaagcgtcctccacgccatctgctgccagaatctgctgcattgtatcatcactgatcacaggaacgccgtccgggattccattgtaatccatctcatacgtccattcatcctgataaagctgaacggtaactgtgttatttccggctcccaccagattctgcttgatctgctcatttgttccctgaattgtggaaacaatcgcaataatcgcaccaataccgataataataccaagcatcgtcagaaaggaacgcattttatgtgaccaaatgccctgaaaggacagtctaatattttctaacatttcacgcacctccccttaatactctgccccatctgaatccactgcgcgaataccttcttttgcagtctttccatatggaaatgcaatgcggtcatcctctgtcagtccggatttaatttcaatggtatcaccgtaaatgatttttcctgtttttacatactgttttaccaaacggtcattttcatcggcctttaatacataagactttccattttcagaacgcacatagcctttgaaaatataaattgacgcaccatcttcctcatcggataccgtcatgttaagatccacatactctccatttcgaagtcctgtggaatcctcaatatacgcaacaaatggatagtaagacacgttattgttgccgcccccgtaagaagatacatctgtagacggataatttttgatttctgtaatttctgcctcacagcttgttccgctctcccaggaagaaacgctgacggtctgccccggttttactttatccagcagaagttcactgattccaccggtcacgtacagtccttcagaacctgcgatttccataaacggtgttccatcggttggaagattatctttatcctgtagattttttacagttccggttacatttgcatagataatgccatcgctgctctgtgctttcagtttttctacgtccagctctgcttttcgcttatccagatccagatctttaatcttcttttcctgttctgaaatcataccattcagttcactctgggtataaccaccctgatcaatggcatccgctccggtatcatccacagtatctgtgtctgacacatccgtatcctccgtcagctgtgtatgatctgccacagaccagcgggtatctgcatccggcaccacgatctgagaaccatccacttcccattctgacaaaagttctccggatacactgttattctcatggatttcaaataccacatgcagtccggcttctgataactgactgaaaaaacttcctgtcacataagcatcttccgtacacagataacgatatggattctctgcacttccatctgcttcattctgattataaggcaccgctgtccataaaatataattataggcatccccgctcatttccggaacatccggtgttgaaggtgtcgatgaatccggctttacaggttctgacggttccacatacggttttgtatttttcagcttctttaattcattctgtgcaagtgtgatctgatttttcagattttccacttccagctcttttccctgcagattcagggttgtaactgtcgtatccaatgccagcagtttatcgcctttctgcacctgctgtccttcttcgacataaacttctttaatctcatcctcttttgagatctctacggtctgggaataatcatttgtcac

SEQ ID NO: 13491 - DNA, 16241 bp, Unknown
  gut microbiota DNA sequence
ccaatccccccgactgccacagcagcaacaatggcgattacaagaacacgtttcatgacttttttatttttcattctgccgcctcctctatctcaccatcgataatgcggatcacacgttttgcataagaagcaatcttggcatcgtgtgtgatcataacaattgttacaccttcttcattcaaccgttcaaacagctccatgatctgctttcctgatttggaatctaacgcacccgtcggctcatctgcaagtaaaatcttcggattattcaccattgcgcgggcaattgccacacgctgtttttgtcctccggaaagctgtgtcggtttgaaatccacacgatctgccagtcccacgcgctccagtgccgccgctgcacgtttttcccggtctgcttttttcacacctgcatagattagcggaagtgccacattttccagtgcactctcccggggcagcagatgaaaactctgaaatacaaatccaatgctgttcagtctcacatctgccagctccctgtctttgcaagccagcacatcctgtccggagagttcataacttccgctggttggcagatccagacacccgataatattcatcaatgtggtttttccagaaccggatggtcccatgattgccacatattcgccttcttccacggaaaggctgacgtcttttaataccggaactaccagcttctcctgctgataatccttataaatatgactgagatttaaaagcatagatccacccccttattctgctgccggagtgtctgtacttcctgtgtcagcacctgaatctccatcttccggtccgtctaccaccggtttcatatcattttcatctaccatacctgtgtcaatattttcatccatattataggaatctgtcatactgctgtcttccggggtttcatcggacaaatcctgctgataaccttcatccgtatcactggaaaggtctccatcatccgggtattcttccaccattccttcatctacatttgtagttgtctttaacccctcacggaatccggataccggccatgcaatcatatcatccagtgccaaaccggatttgatctcatacatatccataccttcgtcatattcaccaagttctaccgtacgtttctccagtttgccttttccattatctgcccatacatacggggtatcttcatcctgtacaatatagccgctgtaaatccagataccatcctttgtctctgtctgtccctcatccagctccacatacagatgctgacctaacatcagtccatctgcggaatccagttttacataaaacggatatttggtagactgattatcagaattcgatccagtagaagacatgaccccattattgttatctgactccttattttctgtatcaattttttcaatcgttccactccatgtttttgtatcatctactctggaacgaagaatcactgcttgaccttcggacagtttgtaaacatttgtctcattcacggtaccttttacacgataatcaccagttgtcaaaattgacataaacggctgtgtattgccgtactggtcagaatcgccattttcattgatggattttaccacaccgttgatcttgctggttacggtagactgtgacatggtatcttccattttctgaatctctaactttttactctgctgctcatattcagactgcttgatggatgtctgcaggctctggatctgtaccgtataattaaactgttcatccttagatgctgcatttttctctgcggtaagtgtcttgatctgattgttgtaatcggtgatctgatttccgatactttcaagttccagttttgcctgtgcaatctgcaggctcagatcatcagtcttgtactcaaataatggggttccttcctgcacttcatctccgactgctacaaaaatctgttttacggtctgatccgaactcagtgtgatattccaggtatcctgtgattccaccacacccatataccgattctggcttccggcgttgactgcacctgtcatggactgtaccgactccacataagctgcatctccaccactcttactgtttccaagccggtctttcaggaaaaaaccaacggctactgctgcgacagctgcaacgatgacaactgccaaaatgatttttttctttttgctcatatcgcgctcctcctatattcagtaaatccgtatcgtctcataattatcctttccactgccgactgcaccgtgcaatggaaacgaaaactcactcaaacagacaaaaaaatggctacagatttcctttctgtaaccattttatcatgccgtattttttaatactattaagatacccttaatttttaactttttgcaatccctgtatctaagccatttcttgaaaaatctgttactaacatgttactaatacgatacctatttttctgtcagatatgggaaaagttctatgcttcgtttcaagattcctttcatctgtgcgatcgcaattccataattcgtaaacggtacattctgatccaccgcacacttcatgcggtatttcacttcacgctcgttgagcatacatccaccacaatggatcaccagcgcatacggtgtcagctcctccgggaattccgttccggaacttgtctcaatgatgagctcttttccggtgtgctgctttaaccagcgcggaatcttcacggttccgatgtcgtcacactggcgatgatgcgtacatccttcagaaatcaggattttatctccatctttcagattttcaatagctcccacgcctttcaccgctgtatcaagatatcctttataacgtgccattaatatagaaaaagaagtcagcggaatctcctgtggcacttctgcggatacctgctcaaatgcctgactgtccgtgattaccattgccggttgtttgccaagctgctctaatgtctgttttaattctgtctctttcaccacgattgctgctgcatttgcttccagaacatcacggattgtctgctgctgtggcagaatcagacgtcctttcggtgctgcggaatcaattggaacaacaaggactgcaaaatctcccggattcagcagatctccgacgattttcagagtcatgtcttcatttggtgtcagttttccaatacattcttttaattcatagatgccgtatccggtgagggcactgacatacaatttctgcccggatacaataactgcatttttctctgctttcccagaatcagatacatttttctctgtctgatccgatgtcccagatgcgctttctttttccgtttttaatgtttcctgatcagatacattttctttcgtttcatctgcttctgttctctttggacagacttctgatttttttaccaaactatctgacagtaaatctgctttgttatttacaataatatatggaatctctttttccttaaaaatatggatcagttcttcatcgcactgctttttcccttctgtggcatctatcacaagcactgcaatatctgttttattcaatacttgttttgtctttctgacacgcaacgcccccaatgccccttcatcatcaaagccaggtgtgtcaatgatcattacaggtccgattggcagaagctccattgatttataaaccggatcggtagtcgttccttttgtatctgatactactgccagttcctgccccgttaccgcgtttaccacgctggatttgcctgcatttcttcgtccaaaaaagccaatatgtacacgattggcacttggtgtactatttaatcccatttttatactctcctccacttcctgcaaaaaaacttgttgcgaatgtgtttattgtaacacctgcattttcttcttacaacaaaaatgaagtagatttgtgctgaggaaccaaaccacctctcacacatacactaaaaaaaagaatgtaacgacattttggaggttattttgaaaaaaattgtaaaaaaaggaattgccgtattcacctgcaccgctatggctgcaacaatgctgctggcaggctgcggtcagaacaccactccggatgaaaccgacaccagttctgtaaataccgaaaacactgatacatctgataaaaaagatgaagcacctgcatcacagaaagtgaccttgaacgaagtagcacattccattttttatgcaccaatgtatgtagcaatagagcaaggttactttaacgatgcgggtattgatcttgatctggtgactggctttggtgccgacaaagttatgacagctgtgctttccggtgaagcagacattggttttatgggaccggaaactaccgtctatacagcaaatgaaggcagcaaagatccagtagtaaactttgcacagctgacacaaagagctggtaattttctggtagccagggaagaaatcaccgattttgaatgggcagatctgattggaaaagatgtgcttggtggtagagccggtggcatgccggaaatggtatttgaatatattctaaaacagaatagcattgacccatctgaagtaaacattgaccagagcattgattttggttctaccggagcagcttttaccggcggtcagggtgaatacacggtagaatttgaaccgggtgcaaccttacttgaacaggaaaatgccggttatgtagtggcatcccttggtgtggattccggctacgtaccgtacaccgcattcagtgcaaaaacaagttatatggagaaacacccagatgtgatccaggcatttacagatgcattacagaaaggcatggaatatgtcaatacgcatacaccggaagaaattgcttccgtcattcagccacagttctctgagacagataccgacaccattaccacaattatccgtcgatatcaggagcaggatacatggaaaaccgaccttgtattttccgaagatagtttcgaactgttactggatattctggaaagcgccggacagttggaaaaacgcccggattacaaagatgttgttaccacagaatacgcagaaaaagcattacagtaagaagtggggggacactccccccaatcacataaaaaatctcacgatttttttctcgcctaaattttataccgtaacttaaattttaatgtgcaaattgactattatacaaattataatagaaccctttctgtgccagcaattcctcatgatttccctgctcaatgatcgtaccatctttcataaccagaatccgatccgcattctgaatcgtagaaagtcgatgtgccacaataaaactggtgcgccctttcatcaattttgcaaatgcatcctgaattttgatctccgttctggtatcaatggaagatgtcgcctcatccagaatcagcatcggcggctggcagagcataacacgcgcaatggagatcaactgcttctgtccctgagacagacttccgccatcttctccgatcccggtatcgtatccgtcggacagacgtttgataaatccatgcgcatggcaggcttttgccgctgcgatcatttcttcctctgtcgcatccggttttcccatgcagatattttcacgaattgtaccggcttttaaccaggtatcctgcaataccataccataattcagtctcagactgtctctggtcacatgacggatatcctgatcttccacgcagacagctccggcattgacgtcataaaaccgcatcaacagattgatcagcgtcgtttttccacatccggtcggaccaacgattgcgatagtctgtcccggttttacatccagattcagatgctcaataagtttctgctccggcagataagaaaaatcaacatccttcagtgttacttttccttccacctgatccactataactgcatcagcatcatccggaatctccacatcttcttcaattagttcaaaaatacgtgccgcacaggcaagcgcattctgtaattcagtaataacacctgaaatctcattaaacggcttcgtatactggtttgcataacttaaaaagcaggaaagtccaccgacagacatgcctcctgaaataacactcaaagctcccgtcaatgcaacaccggcatacaccagactgtttacgaatctggtacacggatttgtcagagaagagaaaaatgttgcacgcagagaacagctctgtaaccggtcgttaatttcgtcaaactgctccagtgcttcatcctcatgggaaaatgcctgtacgatcttctgatttcctaccatctcatcgatcagagccgtctgttctgctctggtctccgactgcagacggaacatgtcatacgtccgttttgcaataaatcttgccacaaacagggaaatcggtgtcagtccgacaaccaccagtgtaattcccggatggatcgtcagcataaagatcaatgttccgataatcgtaacaacaccggtaaacaactgggtaaatcccatcagaagtccatcggcaaactgatctacatccgcaataacacggctgacgatctcaccataagaatgtgcatccagatattttaacggcagtttctgaatccgtgtaaatgcctgatttcgcacatcacgcactacctgatacgttactttgttattgatcgtattcatcaaccactgcaaaacggcagtcaccgctgccagaattccaatttcaattaaaagctttaaaatattttcaaaatcgacatttttccagtctacgataaaatcaatggcacgtcctaccagaatcggaatatataaggtcagtgccacagtcactgctgccagtacgatagaagccagcatccagaaacggtaagttccgatatattgaagcactttttttaatgttttcatctgtgatccggatttactcacaagtaattcctccttttttattattgttcgcaattcacgctacttcctgtctataagtaaataggtggctttctgtaacatccttacagccagtaaagcggacattcgcaatccgctttcgctgcttgctcatgaacgcagtcgctttgcgacctgtcagtgggagcttttaactcccactgacataagcatccccccttccccaccgcttagtgctccacgcacttgaagctggggaatgcttattctgcgttcaatctgtataagttctacgctcgaaaccttatttactttttttgtactgagactcataaatctcccgatatacttcacaggaatccatcagttcctcatgcgttccaagtccgaccacattgccatcatccaataccacaatctgatctgcatactggatcgccgaagttctctgtgaaacaataaataacgttggcttgtcctccatcgctccaatcgccatacgaagtgccgcatctgtcgcaaaatcaagtgccgaagaactgtcgtccaaaatcaggatttccggttttttcaccagcgcacgggcaatagtcagacgctgtctctgacctccggagaaattctttcctccctgctctacttctgtgtctaaaccatcttctttctttaaaacaacttctttcgcctgcgcgatctctaaggcctcaaatatttcttcttccgttgcgtccggcttgccccactgcgtattagaacggatcgtgcctgcaaacaatacggatttctgtggaacaacaccaatccgctcacgcagatcctccagaccatattctttgacatcttttccatccacgtaaaccgcaccggaactgcaatcataaaaacgtggaatcagattgaccatagaagatttaccggaaccggttcctccgatgattccgatagtctgtccctttttcaccttcaggtcaatgccgctgattgcttcttctgctgcctgcggataacggattcccgcatgttcaaacacaacactgtattctgacgcatttcctgcaccattctgattgtcagaatttttttcctgcatttcatccaacttggcagattcttttctttcttccatcgctccggatgtcttaccatctgcattgccatctgtaatagaaggttctacctccaacacagactggattctgtttccacatgccacagattttgtaatattaatgatcaggtttgccagcttgatcagctctgtcagaatctgagacatatagttatacagtgcaaccactgcaccctgtgtaatgatacccatatctacacggatcgcgccaacccagatcagtgcgataattgccacattgataatgacataggtaagcggatttaacaatgcggaaattcttcctacaaacttctgtgtatccgtcagcacctgattctgtttctgaaattcggattcttcttccttttccttgcagaatgcacgaaggacacggacacccatcagattttctctggtcagtccaagtactttatccaggcggttctgtacctttcggtaaagtgggatgcatgcaagcataatgccaaatacaaccactgccagcgccgggattcccaccacaaacaccaatgccgccttcacatcaatagtaaatgccatgatcatcgcaccgatgactacaaacggagaacgcagcaacaggcgcagcgtcagattgactccgttctgcacctgattcatatcactggtcattctggtgatcagtgtcgatgttccctgtgtatccagctccgcataagaaagcttctgaatatgcgcaaacaggacgtgacgtatctttgtcacaaaaccaaccgccgcctttgccgcaaaatactgggcagtgatagaaaacgccagtccgataattccaaacaaaacaagaacgaagcacatctttacgacgtagctccgatcctgattgccgatacctgtatcaatgatcgccgcaactaccagaggcacaaacaattccagtgttgcctccagcagtttaaacaacggtcctaacacagactcttttctataatcttttaaataacgcaataattttttcattacttttttgattccccctccggcaattctgatttctcattcactctttgaaaaaacatcagttattgattccatgatgtaccggtgttgtatcttttgaaatcggatagaaagaatatccattattttttccatatgtgataatgctctgcaatgcatctgcggatgtctgttttgctgaagtatcatgcataagtacgacattattccgtccatgcttaaatccgcctgttacatttcctataatcaggttgaccggacggttattgccctctgcatcgccggaagaaacattccagtccatatacatcagtccgtcatccgtcacacgctgtgccagctgtgtcataacgccctggcaatatttctcgctgacagtatttgaacttccacccgggaaacgaatgacaaatgcatcatatcccgtatcctctttcaatttatttttcaacttattgatattttccataaatgcatccacagatgtataaatctgagaataatcatgggaatatccatggattccgatcgtatgtccttcatcgatcattcgtttaatgatcggcagcttatcttcatcataatcacagataaagaatgttgctttgattccatttgctttcagcgtatccagaatacggactgtgacatcagaacttggtccgtcatcaaaagtcagataaatcgcatctcccgtgtttacctctaccttttccaccgtcacatttctggttgcctgtgcggtgtttccactggaatcggtcactgtataagtaatcgtatatgttccagaacgataaatatccacatatccgtcttttgttacattcgcagtcagatcaccatcacggtcatccacagcggtcacaccaggatcttcaaatttttcctgctccttgatcgtgatatcggaatccccgttcaatgtgatctgcggtgcctgtgtatcctgtagacacacctcccgctctgcagtagattcattgtcatgactgtcttttaccgtataggtcactttccatgtataatcgttgacctgctccatcttggttttaatatcagaagaaacgtctccatcacaggcatccgcagcagtcgctcccggctcctggtattcgtcaatggatgttggaaccactactttcgcatctccatttaaggtaatgaccggaccggtatggtcaaccacatttacaacacgtcttttcgttacttttctctttttgtattttaccttgtattcaatctcatactgaccaagctttgacgtattgacgctgccacttgtctcgatcagattgctgatatcctcatcttttaccgtcgctttcacgcccggatcctgaaatgtagtaccacattccgcatctatctcatctccgccggtcagcgtaatgatcggactgcctccgaccaccggactgatcgccagaataaacaggcagattcccaccagtgcgatcacaccggcagtcatcagtctgcgatccttttcgttatcaaatattgtattccaaatttcccttagtttcttcatcttcaacgtccttcaatctctcattttatctatatgcattaaccgggctctcatacccgcaacctatcatagcacacttcctcaaaaaaatcctttaagtttatgttaagatttgctgtcaatttctgtatttcacgcatatttttgccagatcaaggaccattctccccttctttcctcttttacgtaaattttacatttatatacactctgcccatgcttctaatttgtaaaattcatatactgcggcgcactctgaacaaactcatccactgtgattgcttttccaagcagcttcttaatcagatttcgccagttatcgccatcttctttatccatgaccgcataccataatggtgtatacacactggattcatcgatcatctgatggaactgtttcactgccagcggactgtcctccggtacggtcagaccactctgctgaatcatatccagataatcatactgctccacattccgctcatttacccgctttgcgaactccagacaaagctctgccgcctcatcctgatattccgaatcagaactgatggaaagtcccggtgtcagcgtatgattgatatctaccatatattttccatcgtcatcactgcgctgtgtatatcccggaaattgctccacagaaatcgcatcactgcccatttcatccatcaaatggaatacaatcgtagactgatgcgggaaaagcactgcctgtccttcggcaaaattctgaaccgcttccacctctccggtctccagaaacttctccgggaaagcgcccatatccacaagctgcatcagcttctgcgccgcatctgcaaacacaggatctgaaaaatctatcgttccatcagcaagccgagcctgtgcgtatggattctcacagttgaccatcaccgtgtacaaaagttctgccagccacagatctttgtcaccaagttccaatgctgcataagaagttccgtgttcctcattataagcattgaccttctccaccatttccagcagttcatcccaggtctgcggcatggaaagcccaatctctttcatcagattctgattgcaataagtaaccgcatatgcctctaccagacaggggataatataattatgcccatctttatacggctgtacataggaatctttaaactgataatctgctttttccagatactgttccaccggaacacaagcattggcatcaaacagaaaattcggataatttccaccccagacaacaaagacatccggcagttcatcacaaaccagtgcaatttttaacttatccttgatctgctctgtggaataggtcttcagttcaatgtcatagccaaaatcatcttccagttcctgccacagatctacataatacgtgcctggtgtattttcatcaaaaaatgcccataccgacagtttgattttctcatctgtatccgccgtctccggttctgttttatgattcaaaaacgacagtgaactgccctggcatccgcaaaagaccagactgatgcacaacacagctgccaatatcacacattttattctccgactgtattttctcattctctcctcagctttcttccgatcacatttctctcattttccattgatgttccatctttactaaaaaataccactcacatcttcacataatctttataaaaatagaatctatcatattcaagaatgctccggcattcttgttgcgaggtgcgcgtcatgcaattgcatgacatacttcaactgcgcacctctgtactcctgccggaggctatatcagatgggggattggctcccaccactgatactagcttgtttctcaccacctatagaggtgggagtcatctcccatctgatgtaagtctcaatcataacaaagcggaacaatgctatctttcataatgccacaggcagctatttcatgcaagtacaaaaatatcgatacacaaaaagaaaaaacgccgatggaatcacttccacacggcgctttctcctttgcttaactttttatcgaaacttctgcttcacagattgaacatttcaatataataccctatattaaattattttgcttttgcagcttctccagcctgccaatctttgttgtatttatgatcttttacgaagaatacgatcagtaatacgttgatgactgcaaggcaagcatcgatgatgtaagcgtaacgtacgttaccgcctgtcatgttcataacgaaaccgttgatagcgaatgtcatagctgtaatgataccctggattgggaacagtacagagttaactttgtcatatccctgacgtccgaatacagatgccggaagagatgttgtaaagtttgcggaaccaccgataccgataccgatcatgatgatggaaatccagaaaccagcttttgtgtttgtaaagttacataataacgcacatgcataccagataccaaagaagatcatagctttctttgtaccgatcttctgatcaagcacaccgattaagaaagatcccacaacaccgattactgcacaaacagacatgatagatacagctgttacagttgcagttgcctcatttgcaccgaaagatacaagtaaggaagtagaacgacctaccatctgagacatagtacctacagaacaaatctggaatacaccagttacaatagctacgatccagatctggtcacattttaacagtttacctgttgtccagccaccatcgtctgttgcgtctgtatcatactctgcttcgtatacttctttggaaacgttatccgggtacatatttctctcaaacggagtgttacgtacgaagataagtccaacgacaccaagaatgataaccgcgatagagattggaagacctgctttatgtacgcctaatttacctactaagaatacgatcaatggaacgaatgctgctgtagcaaggttgtgtcccattgttgtatatcccataacaataccttttttcttcgggaaccagttagcaaccagtacaccaccgcaaaggtaaccagcggacatgattgtaccacatgtgatagccatcatgattgtgtaaactgctgtgttcggagcatttaaaacgcccatgtaagtgataccggcgatgatacagttgatacctgacatcatacgtgcgccaatcttacggttaacaacaccaacgatcaagaagatgatgacaccaagaacacctgcgattgcattacagttagaaatgttacctgctgttgttcccattgcctcagcaatgtttccagcaatgttgttactaccatcattgatcattcctacatagaaccagaacatcaataacatgtagatgatgtggaaccagcctgcgccaccgaaagcgactactgaatccttgttggattttttgttcattttccttgtcctcccaatataaatacttaaaaccctttgcccttgtaattactcacaagcactttttcaaacctcgttcattatacaaaaatgtgcccataaaaatataaaggaaatttcgttttttattgactatttttaggtgttgaaacaactattttatatgttttgtgatagtgcacaaaacaattgtttattttttatcaataattacctgtaaactttttttcttttcctgtgtacggttttctgatagaataaatgggatgaaacagacaaattttattttcttttcatatttattttatttatattttcgataatgaaattatttttcagcgattgtttattttttatcagagattaaggggttaaaattccatgaataagaaacattttaagttaaaacacaaccacagtccgcagcgatttcagacaaagctgctgctgtccatcttccggattgccacaccggtgatcggcatcatctgcggcatttccctctggatgctgtcgcaaaactaccagcagacggtcatcaattcacaggcagccgccacagaaaaaattcgaagtgatgttgccaacctgctggaaaatacccagaccgtgtcgcaggatatgatctttaacagtgcgattcaacagatcctgtctgacagtacttccggtgagcagtttccgcaaaatgcagacgtttcctaccatgtgaatggtttcattgcaaaccgtgactatatcaactgtgtagttttaacgggacacaatcagacactgtattccacagagaaggcttttaccagcatttctgattatgacacgatcctgcattcccgctggcttgccacactgcgggagagcaatgaaccattcctctggtttgtaaatccggattaccgcccggtgacagatgatgccagcacttctgatgacgatgcctgcgacaactttccgggtgcttcggaaatggatacacaaccggcagtcaatcagggagaaccacagcatcttatgatggcaagaccggtatacagcacgacagactattccaccagactgggttatatggtcgtatatctggatgattcctatctctgtgatctgttaaatggcttccagtttggcaagacaacaaatacctggcttgtaaacagtgacggaaaagccatcctgcgcagcaccgtttccaatgattactcttttttaatggatgaactggagccagcagaaacaggaacaatcctttcacataatggtcagaaatttgtcatcaatattaagccggtgactcagaatggatggtatatttatacggcaacaccttttaatgaagtagatgaaccgctctccatcttcctactgcaatcgatcctgctggcactgatgatgatcgtactcttgtttttccttgcagcacgtacatccacctcactgtccagtccgatcatttatctggcacacaacatggataattaccgcagcaatacgacaccggaaccattttccatgcatacaccacgcaaaccgcagccggaagaaaaaacactggataccagagggctgcccgctgagatcattcagatctacgattcctatcaacagatggttgcccgtatcaataccctgatccgcgaaaattatgtcaaaaatctggaaaagaaagacgctgaacttgccctgctgcaaagtcagatcaatccgcactttctgtataacacgctggactccatcaactggatggcaatttccaacgatcaggatgagatcagcgaaatggttactgcgctctccgatatgttccgactgagtctgaccaagagcaaaagttcgtttatcccactttcccaggagcttgattatgttcgaagttatctgctgttgcaacagttccgctatcaggattgtctggatatcgctattgattgtccggatgctttcggggattttctggttccgcgttttacgctccagccactggtggaaaatgcgatcaagcacggcattacctctccggatgaaccattttccattaatctgcaggttctgatccagaaatatgaacttcatatcttaattggaaacgatggtgcccgcatttctctggagcatatggaacagttactggatttcgatgctagtcagcatgaattgcttgattttgacgaaaacagctacggtgtgcaaaatattcaccgccgtattcagttgatctgtggcttacagtatggactgtcttactttatccgtggtggaagaacttactgcgacatcagactgccgatccaaaaaaaagagaaaacggcacctcaggaaacggaagatcgtgccgacgatacagaaaaataattcaagtcgaacgc

SEQ ID NO: 13492 - DNA, 146 bp, Unknown
  gut microbiota DNA sequence
ttatcttatcaattatatccctaaaaatcaatttaaaacataaagaaatcaaaaaatgctttattgatattctcttaaaagtcaaagaagtcaaaaacgtaattgacattttgatatctttgtgtataatgtaaatcaagaagtca

SEQ ID NO: 13493 - DNA, 575 bp, Unknown
  gut microbiota DNA sequence
gttatcggatgatgcatttccacatccggcaaccatagctgccaccattgccccaacaagtaataaactaattgccttcttcttcatgtttactttccctttctttctctttaatgatttttccttgtcctttaattcatgttgttcataaatatcctgatgcctatatattatgcaaatcccgtgccaattttggtttcgccgcaaacgcccgtttttcggcattttgcaccatgtgtttcactgttttcgcctccgttcatgcaacaacgttgcgttgcagcaacgcaattattgtcttttacagcagtttacattgtgcaacagtactcacatcctgtttcatatgtgcaatatgtacaatctgtcaaaacaacaaaagaccggcacatgcggtctgcatgtgccgatcctttttgttgtcttaacacgttagagaagaatctaaagtaatcgttagctcagttttttaatctctgatctttgacttccattattccggaagattgtagatggtatctgcatatgttttcaggaactcatcatatgtatctactgttacatccgggttgtat

SEQ ID NO: 13494 - DNA, 2055 bp, Unknown
  gut microbiota DNA sequence
gggggggggtaaaatcctgctaggtgcatgattatcggaaagaaatattgagaaagtcaaatttggagaaaaagaactgtctgcgtatgaaaaacatgcgctggcgagcttttatcataaaatggttacattgtgttatgaaagcagtaaccggcggtggaaattaatgatgcgttattattattgttttgaattgtcagggggacatgagttgtggtaactggaatcgcaggtgtgctgaccgtgatcggcgaacatttctggctggttgtgatcgcatgtattgaagtggcagtggcatttattttgcttggaactgcttacaaacgaaaaaaatacagaaatgaccggtcaggcggagcgcagatcgaaggtgtggagcgagactttttagaagcctgcaatgactggagaaatgaggcatgcattatggttcgccgggaggatctcctgccggtttatgctacagacagtttttatgacatgcttggtctgaatctgcggatgctgcaggaggatattcgaaatatcggacttaatatggcagatccggaggatgagaaaaggctctggaaaaagtatgaacagtgggatggcaaagaaccgttggaagaatcggtcaaatggaataccggaaaatggctgctgcttggatttcgacggacagaggatggtgtctatgatctgatgtctgtgtatgaaatcacacagttacatgagaagattctgcaatacgaagatcgtctggatgcagcagaagaagcaagtcagtccaagacaagtttcctgtaccggatgtcccatgagatccgtaccccgatgaatggtatcatgggtatgctccggctggcaaaagagaaaatggaaccacaggctccgcctatgcagtatctggacaagaccgaagaactggcaggacatttgctggcactgatcaatgacattctggatatgtcacgtattgaggcaggcaaggtagagctggagcacaaaccgttcagtttgaatcgtatgcgtgagcgcctgtacgatatgtttgccaagaacctggaagcaagaaatatccgttatgcggttaattttgaagatattacagtggattatgtggttggtgatgaactgcgtctggatcaggtgatcatcaacttcctttccaatgccgtaaaattcacctccgaaggtgagatcatcgtcaccttccgtcagatgatgatccaggaacagacactggatctgatgatcagcgtgcgtgataccggtattggtatggatccaagttatgtacagcgtattttccgcccgtttgatcaggaacattctgacacggtgaagaagtacggtggaaccggtctgggtatggcgatcactgaccagatcgtaaaactgatgggtggtgagatcgtcattcatacggcatcgggaaaaggaaccgatttttctgtgtttctgcacttaccgatcgcagatgaagcaagtattcaggaagctgcaaaaatcgaggagcgtcaggaggaagaagtatccggagaatctgtattctatggaagacggattctgctggcagaggataatgagatcaatgccatggttgcagaggaaatccttggcggtttcggcgcgcaggtggatgtggcagaaaatggtcaacttgcggtacagatgtttgaagaaaaaccagaaaattactatgatttcatattaatggatatacagatgccggtcatggacggaagggaagcaacagaaacaatccgtcagctgaatcgtccggatgcgcagaccgtattgatctttggtctgtctgcagatgcgtttgtggaggatgagcgtaaatcaattgcatgtggcatgaatggtcactatgcaaaaccgattgattttgaagcattacagcgaaatatcggcagttttttgaatgttcagaaaaaataaatgagtgataaaaaatagacaagcgacagagaaaaaggaagttacatcagctgggagatgactcccacctctataggtggtgagaaacaagctagtatcagtggtgggagccaatcccccatc

SEQ ID NO: 13495 - DNA, 1508 bp, Unknown
  gut microbiota DNA sequence
aattcaaacaggatttaatagccacgcttttcatctattacagacataatttttgtgaacaaaatccctgccattgaggaaattgtcgtagcaacgatcgctgctccggtaatccctgccggatccggcgaaccatactgacttcgataggcaatgaccgttactgggatcagttgaagagaagaaatattcagcaccagaaacgtacacatttctgtggaagctgctttttccttttttctctgttcccgcaaaatccggtctgaaccaaaatcataccggctctgagcagactgaccgaccgcctgcattagagtcctttctttttccagctcatccagatcttccattgcctgcagaccggcaggtgtcgctgcccatcccagaccgaaaaaatttgctatacagttcgctgcaatggacttgcatgccggatgatcctttggcactcttggaaacaggaaatgcagcaacggataaatccgctccgctgcccggcgcatcatgccggcattctccgcaatctgcatcagtcccacccaaaatgccagaacacctgccatcgtgatacaaattgccactgcctgctgtgcggaatccagtgctgcgtccgtcactgcctgcagatttccggtaaaagccgcataaacgattcccgccaggatcataaaaagccacaaaaaattcagcatacgccgtcagctccctttggagtttctaacaacatatgctgaactacatattaatattctttattttccataggtacggaaaaatgcacttaagttcgtcagcgcctttaccagcacctttgtctgttcctcattcagaccgttcaatgtcgctttgatcatctcatcatggaaatttgcatgatgatgatatgctttcacccctttttccgtcagtgagatcagtaccacacggcgatctttctcacttcgcacacgctttacatatgccttttttacaaggttattgatcgcaatcgtcaacgttcccacagtgacagacagatcctttgccacagatgacatgctgcgcggctcatccagtccgattgcttctataatgtgcatatcattgttggaaatgtctttgaactcctccgtaatgatcgctttttcttcaatattcatgatttcattaaataatttgaccaacaggtcatgcagtgtatcgtatccttccaatgcgctcctcctgatactttgtgtatcaaaatttttgatagattgacaaattgattatacacaatgtccctgcacttcgcaagttctatccatcgattctgttatatccaattgcttctgttcatacattattagtaattatgattcgaaccggtacttccttatgcgccactgtcattctcattttttccataaaattcggttttccctgtttcttgcactgttcctcattggatttgggattttctgtgccgcagtctgccaatgcgccgactccgatacctggatcgcacagttttttcacgaatcccccac

SEQ ID NO: 13496 - DNA, 11434 bp, Unknown
  gut microbiota DNA sequence
gtaaatacagattttgaaaactatattgctgaactgttccgccaggaagcctctgcaagtctgctaaatcttcattataccttggaaaatccgcaggcttatcaaatcacggaatatcagacttctctcggaaattacagcgctgcctctccggcacttgctgctgcctccgcggaaaacgttctctctgccctgcatcaatttgatgcccaaaatctgacaacgctcaaccgtcagacactggaaatcctgacagacagtatgaatctcaccgtagccggcggaaattttaaatattatgacgaaccactaacacccaccaccggtctacaatcccagattccgatcctgctggcagaatacaccttccagagcaaacaggatgtttctgattatctggaactgctgaccgacctgccccgctattttgcccagatctgcgactatgaacgggaaaaagctgctgccgatcgttttatgccctcttacacggcgcagactatcatcgatcagtgccgggattttgtttccaatccggaggagcattacctggttacaacgtttaaccagaaaatctctgccctctccggcatttccaaaaatgaacggcggtcttatcagaagcagaatctttctattttaaaaaagcaggtctttccggcatttacacaactggcagacacgttaagcgaattggaggatagcaccatcaacgaagccggactctgccattttccggaaggacgcgaatattatgaatatctggtgcgctgtgccaccggaagcagtgacagtgtcgcttcccttgaaaaacgtaccacagatcaacgcaaagaagacctccttctcatatcacaactgttggagcaaaaccctgacctgacaacggaattggaaaactgcgccgttgcaccccagtctccggaagaaatgcttacgactctgcggcaggcaatttcggcagaatttccagaagtaccggaatgcaatgtgacggtcaaatatgtggatgccgccatggaagattatctctctccggcgttttatctgacctccccactggatcatctgaccgaaaattcaatttacattaatcagaaaaacggatatgaagggcttcgactttttacaacgctggcacacgaaggatttccgggacatttgttccagaatgtgtattttcactccatttgtgatctaccgatccgctcgctgcttggctatccgggttacaccgaagggtgggcaacgtttgtggaattgcattcttacacctatgccggattgtctgaagatgctgccagtctctgtgcagcaaatcaggcggcgattttgagtctgtatgcgactgcggatatgggaattcattatgaggggtggacgttggacgatacggcaacgtttttcgggacttatggattcacggatgaagaaaccattcgggatatttttgagttgatcgtgggagaacctgccaattatctgaaatattatatcgggtatctggaatttcatgatctgcaggcagatatgaaaaagcagaatccggatacttatacggattctgacttttataaaaaggtactcgacatcggtccggcgccatttggggtgttgcgggagtacgtactcggggatcgataggtttatatagttcaagaatgctccggcattcttgttgcgaggtgcgcgtcatgcaattgcatgacatacttcaactgcgcacctctgtactcctgccggaggctatatcagatgggggattggctcccatctgatatataaaggggatatctaaggagaaatctcaggattttgtctccgcggctaacaatcgctcgctgagaaaaaatcctgagatttctccatttacacattggcttaacgtatctattattatgccgaaaggaaaatacgactactttatcgttgcttttttattccaccgtgactattccgtttatttcttctaccgttttttctaaatacaaaaagttctgttcaactatttttgtaataattcccacattgagaaacgactaagcaacactgtatagaaaaaggaatcaggacattttgtcctggaaggcgattgttagcctccaggacaaaataccctgattccgcttcactaaagttccgttataccacattaccggcggcttccgcctgccgtttttccaaacgtttcataatcgcaaagaataccggcattaccacacatgttgccgcaatccatgccgtctgatccgtaaagcacactgccgtgtatccgaatctcggaatcacaaatacagacatcaaacctcttgccagcagctcactcaagcccgcacacatcgcaatcgcactgtatccaagtccctgaatggtcagtcgtgtacagttcaagaatgccaggaagaaatagaaaaatcctgcacatgttaacaactgctgtacataaccaagtacttctgtctcactgctggatacgaacagcaacgctatcttggaacctgcaaaaatcagcacgattccgattccgatactgtacaaaaccgaaattataattccggatttcagtccttcccggattcgttttaagtttccggcaccaaggttctgacttccgaaggtcgcacttgctgtcgcgaatccgtcatacggacacattgccagctgttttacttttgctgctgtcgcaaaagaagatacatatactgcgccaagtgtatttaccgcactctgaagcatgatgcttccgatggctgtaatggaaaactgtaatcccatcggtactgccatagtaaacaatgtctttatgtaatgcatatccagtttgcgctcctgaacatttgttttcaggacatcatattttttcttcatgtagataaaacagagaataccagatattgcctgtgacaaaatcgttgcccatccggctccggcggttcctagtttgaatacaatgataaaaagcatatccagaaaaatattcatcaccgcagacaataccagaaaataaaacggcgtcttggaatctcccagcgaccggataatacccgccactacgttatataaaaacgtaaacgggattcccaggaaaatgacaaacaggtaatcatatgacccctgataaaactgatctggtgtcttcatccaggtcaggattgaaccgcacagcgcacaggttacgatcgtcatgatcacagcaagaaaaattgccagatatgccgcattcatcacaaatttacgcatttcgctgtaattttttgcaccaaatttctgcgccacgggtactgcaagtcccgtacaggttccaagacaaaaaccaatgatcagaaaggtgatggatgtagtagaacttacactggtcagggcactcagtcccagataacgacctacgatcacggtatctaccatgttatacatctgctgaaacaagtttcccagtaccagcggtatggaaaactgccaaattaacttcattggacttccaacggttaaatcttttgtcataacgtctcccttccgattactcgttttctgtgtttaaaagcatctgataaatttcacgttttccgacgcccctgtcttttgccacctgcttcatggcgctttttcgatccataccagtgcttaagtagcgctccatatgttcttccacagaaattgcctcccaggattgctgctgctcctgcaccagttcttcccggcttctgccctcaataactaacacgcactctccgcggacgccctgctcctcatagtaactgatcgcttcggaaaatgtagtctgaaatgctgtctcaaatttcttcgtcagctcgcggcagaccgtcagtctgcggtcacccaacgcattctgcagttcttttaacgtgccaagcagatgatgcggcgcctcatacacaatcagcgttcttgtatcatttttcaattcttccaatacggctgcacgctcttttttctcctttggcaaaaatgcctcgaaggaaaagcggcgtgtcggcaaaccggacagcgtcaatgcggtaatgcaggctgctgcccccggaagggaagtcacttcaatgccctgctcgtagcagatgcgcaccagatcttcacccggatcggaaatgcccggtgtacccgcatcggtgatcagcgcaatattcgttccctgctgcattttttccaccaactgataggctttatccactttgttgtactcgtggtagctggtcagcggtgtttttatatcaaaatgattcagcaaatgaatggaatttcgggtgtcttccgccgcgatcagatcaacttcttttaatgtacgcagtacacggagcgtaatgtcttccaaatttccaatcggtgtcgcacataagtataattttcctgccataaccttatttcacctcacaatctaatacaacgttttttattcacacaatcaatggctttaatatccatatacatcgtaaatctcatccgtatattttcccggctctttgtacacgatcagtggcttttccacggtcatgcggctttttccaccccgcagtccctcaatcagcaccatatttggctcccggtccacgtaaggatataccagacgcatccgtttcggctcaatccgatactgcaccatcagagaaatgatctctgccagacggaatgggcggtgtaccatataaaaacgtccacccggcaccaaaaggcgcgcgctctcccggataatatcttccaaattgcacaatacctcatggcgtgcaatggtttttgcctcatgcagattcgtcagtccgtgctgcgcggtcatatacggtggatttgtcgtcacgacatgaaaagaagatgctccaaaaatctttgaagcatccttaatatcaccttctacgatgtcgatccgatcctgcagattattcagcgccacactacgccgcgccatgtccgcactctccggctgaatctccagaccggtaaaatattttccatcggtcttggcttccatcagaatcgggataattccgtttccgcaacccagatccagacagttttcgtgtttttttgcccgggcaaagccggacagcagcaccgcatccataccgaaacagaatttttccggattctggataatgcggtaaccgtttcgctgtaattcgtcgattcgttctcccggcaataaattactcatttaacttggaatgtcctcccttgtcctctaactcagcaagtttgcgcatttcctctttgctcagacgctcgccatgatctctgcggcgtttggaacggaatttcagctgttttaccggatattcgcggatttctttctcatcgcctacatccacaacgactttcaccagctggcgcagtacgctgacactctgtacctcacctttcagaccgtccagggttgtcacgcggtcacccacattcggcagacggctgtttaagtattcgtaagtttcttcttcgtttttcagacaacacatcaatcgtccacacacaccggaaatcttggtcggattcagggacagattttgctctttcgccatcttgatcgacaccggcgcgaactctgtcaggaatgtgtgacagcacagcggacgtccacaaataccgataccgccaaggattttggtctcatcacggacaccgatctgacgcagctcgattctggtacggaatacactagccagatcttttaccagctcacggaaatcgatacgtccgtctgcggtaaagtaaaacagcagtttgttgttgtcaaaagtatactctgcctgcaccagtttcatggcaagaccgtgtttttcgatcttttccagacagatcttgtatgcatctttttctttctcatggttcttctcttcgatacggtcatcttccggtgtcgccacacgaatgactgctttcaacggctgaaccacttcatcatctgtaatgtcctttggtgggacaattacggtaccgtactcgataccacgggcagtctccacaatgacgtggctgccgcgctccagtttcaggtttttcggatcaaaataatacactttgcccgcctgacggaatcttactccagttacttttatcatctaatattctccttaattgtcaatgccagcatttccatggtcaggtcaaaatttacatttgcccggatccgtctgtctgctgtgtcgattgcatctaaaatatgctgcagtcccgcataagaacatttttccgactggcgtctgatttcatacgcctcctcacggaaaatcaactgctcctccgtcgctgctgctttatataataacacatcacgataccaaaacaaaactaaatcgaaaaattctctgatgtcatctttgaaatcgttcagtggtttgatctcctgtaataaatcatacttcggaatatcacccagtctgcgtaaaagctgggttgtaaaatcttttaattcgttaaaacgctcggaagacgcaaggttcatggcacgtcccacatttcctctggcaaacgccgcacagacttccgccttgtaatccgggatttgacgttgtttcatcagaaactcccgaatcttctcatcattcaccggctttacatccagcatcacgcaccgcgaccgaatcgttggtaaaaatgcatccgcgttcgtggtcagaagcaggatcactgcataagccggcggctcctcaatggttttcagcaatgcattctgcgcctgctgattcattttttctgcttcatccacaatgtatactttatacttactgctgtaaggtttgatctcaatatcatggttgatctgctcacggatatccgcaacggagatcgtgtttggcttttcatggctcagataaataatatccggctgattcttatttaacgactgcttgcaggaatgacattccatgcagggctccgcaatggtttccggatgcagtgcttcccgcggctgtcctgccagaccttccctgtttttaatagaagtctcacactgtagcgccatggcaaatgcctctgccagcatcatttttccactgtctttcggaccattgataatatatgcatgggatactttatccatcacaatggcactctgtaaatgtgcgatcaactgttcatgtccgacaatctcatgaaatcctgccattttgtcacttctgctcctcactgctaaaaatttgctttcgcatgtaaaaattcaagaatgctccggtattcctgctgcctggcaaatagaaaaaacgttatcttcccacaattctacatgcgtttatttcatatctaatatttattatctatataagaagcgatctcctgtgtgacctgatccagatctttattcaggaaatgctttgttatctctgcttttttcagattttcctctgaaaaatcctgctcgtctgccagaaatctgcgacacatttccgcatattttggctgctcctgtgaccgttcccgctccaatgcccgctgcaggcggacaccatcatccacttccacatagattggacacacatgctccgcgccaaaatacgcacgaatctgttcataggcttccaatgttccgatcatcagatagtcactttctgccagaacaatctgtccatcatccgcggtaaaatatttccacacgccatacatggtatcgtatgcccgcaactcaataatcttgccctcgcgttcaaactccgcaacacgctcctcagaacagaaaaaataagattctccctctgtttcaccggaacgaatcgggcgggtggtataaggaaccacacgtcgcagctgcaattcctccattgccagaaggcggttataaatggtatcttttccagatgcacttttgcccatcaggcaataaatctttcccatatgtttctctcctgctctctatttccatccatgtcatctattatttttcacgcatttgtagttttcattttacaacaagtttttctatctgtaaaacccacattgaaaaaatcgcagcaaaaaatcaaacatatgcaaaacttgatgtatgattttgttctacataaactaacatatttctctcaagatcacgatacattatcctggcatatttctaaccagatgccgctgaaatccttcattccctgcacttccatatttcgcttctgacaggttgccagagcatccagaatttccgatgtcaccagttctcccggtgcaagaatcgggatccccggcggatacagatacacaaattccccggacacgcttccggcagattccagaagttttactttttcctttggggcatccatcgcctctgaaatcttcattaccttcttcgccggacgataaatcgcatccgtggtaaaaatctgctgtccgttttctttttccaaatcgtcagagccatcatgaaagctctgatcaatttcctccaatgctgcaaacaaccggtcaaaaccttccttggtatccataatggaagtcagtgccgtggcataatgtcctgacgccatttccagctccagatgatatttttgtgtcagcagatctgccagatcctgtccatgcagaccaaccgcctctgcacagatcagaattttggaactgtctctattccagataccgtcatcgttcccgttttccggaaaaacgcttatatactgtaagttttcacaggattggtaaaaatcatgcaactgctgctcaaatgccgcaaaaagtgtggttccctgttcgcgtaaaatgcgggtacagcggtcaattcccgccatcaaaacataagacggagaactggactgataaatgccaagataacgttttacccgttccagatccacccacggatttttccgataatgcagcaatgccgtctgtgtgtatgccggtaacgtcttgtgcacactttcaatacacagatccgcaccataagaaatcgcctttttcggaaatctttctgaaaaaccaaaatgcgcgccgtgtgcctcatccacgatcaacggaatctgatgtgcatgtacgatctccgcgatcgccgcaatgtcggacaccacaccgtcataggtcggagatgtcagcaaaaccgcctgcgtatccggatactgctccagcatccgatgcacctgcttcggagcaatgctgccctgaataccaaactccgtctgctctggatacagatattctgtctgcaattccatcaaatataccgcatggtacaccgctttgtgacaatttcgcgccatcaaaagccgtccgcctttttttaccgttccacaaactgccgcaagcaatcccgcggtacttccgttgaccaggaaaaaactttcatccgctccaaaagtctgcgctgcccgctgctgtgcttccagcaaaattccttccgcgtggtgcaggttgtcaaacccggtgatctctgtaatgtcaatcgcttcacaattccagtttcccatcgtctggcgcttgtgccccggcatatgaaacggatacgcatccgaattacaatattccagcaatgcccgatccagatatttttcattttctattattccaccacttggctgattcagatatttttcgttttctatcgtaccaacacttggctgattcagatatttttcgttttctatcgtaccaacacttggctgatctgattctgcattctgatttttctccgtcataagtcaccttttacctgtatcttttaataaaaatggcatccatgttttccatgctcttttgtataatataatatttgattatagcataaaaaaatacagggactcaatactgtaaattttatagccagaattttaataacgccgtactctccggcatgtgtacctgaccgacgctgcacgccagtgtcaccggtatgcttccgcggatcttgtcacgcacattctgataaaacgcgcatgcttccagcggaatccgcacttttccatccttcacttctgcttttcgcagcattccatcattttcatattttaaggaagacaaataacgcccctgctccagacaactgatgatgtcaattgaccgttttcctttttcaagctccggcaaaactttctgactgcctcattttcttcttttttctgtaacacaaaatgtgattttccaagttccacatttaacagaatgtcgcgcttgtaatcataaaattcctctgccagtcgtctcggacaggtttcctccgatatctggtaaattcccataattccgggatacgttctcaccgcataacggctatgcagattatatccggtgattgcacgctaataccttccgtcattgcgcaaaaaagagtttaagcacatgatcgaatcatcactgacgatatgttccatacggcaggcaccgtcctccgctttctgctggtctgcctgatagattttcagagtagttaatccctgcagattttccagaaaaaaatctccaagcccaattacgcaaaaaatatataaataatcctccagaaggattaacatctatggacattcgcaacatgagcgaagatgaacttctggacctagactattctatttcttaaatgaagatgatctgtttaatgacgaggcaggtgtagaaggcttttatatcttctaaatctgtatcgttttatctgcatgcccgcctcagtgcgggctattttcgttcaagaggtcggcaaaaatcgaactttcctataaagcaaaaaaaggaatgctttcgcattccttacagtgagcgtgccggggttcgaacccgggacaacttgattaaaagtcaagtgctctaccaactgagctacacacccatatgaaattttgtctttaatgcccagttccggaatcgaaccagagacacgaggattttcagtcctctgctctaccaactgagctaactgggcattgagttgcgggagtaggatttgaacctacgaccttcgggttatgagcccgacgagcttccagactgctccatcccgcgatattagttagcgcttttatttagttttaaaagctaatgggcggagaaggattcgaaccttcgaaggcatcgccagcagatttacagtctgtcccctttggccactcgggaatccacccataacattattcacaaaaatcaaatttctatgcctaatgtaaagccgatgatcggactcgaaccgataacctgctgattacaaatcagctgctctgccaattgagccacatcggcatattcaattttattagttttaaatgggacctacagggctcgaacctgtgaccctctgcttgtaaggcagatgctctcccagctgagctaagatcccatataaaacgacccagacgggactcgaacccgtgacctccgccgtgacagggcggcgctctaaccaactgagccactaggccatcaaaggtatataccttcaaaacttcatacagaatccgaatcatttcaaccttttggtcaagccctcaaacgattagtaacagtcagctccatgtgttaccacacttccacc

SEQ ID NO: 13497 - DNA, 1801 bp, Unknown
  gut microbiota DNA sequence
tttgttgaccggtgaactgttctgttccctgtcgacttcgttagtatacacccatatcaatcagaaagtcaacagatttttctctcttttttgaagttcgacattttattcatattatatatacttttcacgcaattcacacggtttctatttttttctaaccagacttttaggatacgcatccaccaaccatgtcaaacagatatttgcaatccacttataatacttgcccagtcactctaatgttaaactatctctacgcctgctgtcctgcagagtttagtttcaaaacaccggttaaacaatgccactactctgccaacaccgatcattgctgcaattgttccaatgccaattccaatcaaacgtccacgtgccaccaaaccaatcacagctgaaattcccacacaactgcagtccaacagattttttccaagtcccattccttttttcgtcaccattccaagtgtctgagccagaccatctgccgggttcgggatcaagtgcatatctacgatcatcgctgcaccgattcccgtacacacaattgccaacacaagcatcacaatctgtgctccaacatgttctgctactggaataatacctccaaacacattcaaaaacaggctaaacgctaaggaaaatgggatctgcaacagatctttccaaagtacttttcgcaactgtggtaaaaatccccatttcagtccgacttcaatcaacgcaaagcaggtgtacagtaaaaatgtcatcaacgcaaaattcagattccaagcattagccaccgtatatgcaatggaaactaacgcagacacgccaagtccggtttttgtattcaacgtgattcctaatgccagaattacgattcctaatccataactgagcagacgatttatcagttttcgcctcccatctacgcatttatccatatttttatcacttccttatgacaatatttttactatcttttccataattataatttcagattatttctgaacacagcaaatatatttgtacctataattaacagacaagcagcaccttttcttctctatgccaatttcagcagccagaatgtcgtgcggttctcagaactatcctcaatattttctgcgatcatctccagattccacagttttcctgcgcgggcactgcagatcgctgctgttgtctccggcagtgttccctttgccagcatttctgctccaatggccgtatcttcgatctcatgctctgccagattcggaaatttcgccttacgtgtgttgacggtctggcgcaatgcctgcggatgggaagccacctcttttaaagaagcggtatctacgcccggctttttaaacatgcagtgatgaatcggaagcacgtatacaccaattttttcataggaaatattttcaaaggtatgtacaaattcaccaaccggacccgccgtggaattttccacaccaagtacgccgtactgaatttcacctttctgcattgcttccagaatgtttttcgcacataccagcggcaccagttctgtctctgtcatgccagcctctgccagcagctcatttgctgccacttctgaaaaactacccggaatccccatataaccgattttatccattttacaatcctcattctctcatatttttatagacaatttacaaactctatcttatcacttactgtaatataaaacacgaaatcatctcatatctgttcaagtcgaacgcatgtgagacttggtgcgtgattctggtcagcgcaagctgacatcttcttttcagaatcactgcactctacactc

SEQ ID NO: 13498 - DNA, 145 bp, Unknown
  gut microbiota DNA sequence
ctgcattttccttttccctcctgtattgtgctaataattcattcatttcatctcgtacagcctttgtatcctccgctaatgcttcgtttcttaaccgccgataatgtggtatggttcgtgtatccttatgccccaacagccttgc

SEQ ID NO: 13499 - DNA, 237 bp, Unknown
  gut microbiota DNA sequence
ctctggatctgtcagaaataacgttcttctcgcaaactcaacaatcttagaagcctgtttttttataatttccgactccttgtttaaatacagataaaatctgttttcgtctgcctgttccatttcttcaatatcatctattccgtacttatcgcaaaaccgtataagtgcttttaatggttctaaaaaatatcttcgatgtctttgtaccttatccatattcagaatttcacacag

SEQ ID NO: 13500 - DNA, 145 bp, Unknown
  gut microbiota DNA sequence
cgagaatcaggtgatattcctgttcgtggttctggtaattatgcatctgatgagcagaaggaaattgcccgtgtcagacgtgaattacgtgatgcccaagatgcacttgatgtgttaaaaaaagcaatcaacattctgggaaaat

SEQ ID NO: 13501 - DNA, 21750 bp, Unknown
  gut microbiota DNA sequence
ttttttttaaataggggacgatataataaataaagcatgggagaaacagatcagttgccatgggggtctgtatggatcatcgatggcagcacgaggggagaagaaaaaattgttcaaaaaattgaagctcacgacaaaattgactctggtcatcagcgcggtcgtgatggtggtattcgcggtcctcatcaccataactgtcgttacgtccagggccagcatttacacggggatctccggcgagcttgcctcaatcgcggagttcaacggcggggagatccagagcgggtttgacacagtggagcgggcggccctgggcatccaggactacataggacgactttacagcggccaggtcacggaagaaggcgacgctgacctgcagcagagcacgctttatccagggagagctctgacgtccgccgcctataatctggaacaatttgtcgtagagaccgcccgaaatacagtgaaaaacacccccgagatcaagatgctcggcgttatgtttgagccctaccagcttcagagcgatatggaagaatacggattttacgtcaccatggatacagcggatacttccattcatatctatgacgcctacgagggatatgcgaaagaggactcctaccgcattcccgctggagagggacatccctacatctcccagccctatcaggatggagatggcatggtggtggcctatggcacgcctatcacctacgggggacgggtcgtaggtgtggtgatcaccagtgtggacctgggcgccttttcttctgtaaaaaccacaagtacgaattatgattccatgtgggccaccctgttcaatcaggatgggatcattgtctggaacagtaaaagcgcggagtccaccgggctcaatctgtctgatatggtgccagaccctgaccggctggaggagctgaggtccctgatggcccagggaactgcttttcaggcagagatacccgctgaggaaggaaaaaatatttcctgcttttttaacccacttcaggccggggacgagacttggtggtctatgaccggcctctacaccgccgacgcggagagcaccctggtccagacgacgcgcctgctcctgctcctctccctggcgagccttttgctgatcctggccgttgtgatcgtagttctccggcaaatgctgcggcctgtccagagggtggccagggccgcagatgagatcgccagcggtaacttggagatccagttggatgtcagccgtcatgatgagatcggactgctcgccggttccttccagacgatgacagaaaacctgagggcgatcattcaggatatcgactatatgctggatgaaatgagcgtgggaaatttctgcatcaatacccgggaggaagcgcgctatgtcggggagtacggacgtatcctggattcgatacggcgtatcaaccggacactcagccacacattgaggcagatcgatggcgcggccaatcatgtcttttctgggtcagagcaggcatctgtaggcgctcagtctatggcgcagggcgccacggagcaggcatccgccattcaggaactggcggccacggcctctgacattttggagcatgtacaaagcaatgcggagcatgcgcggaatgtcagcgaaaaggcggtgacggtgggccgtgaaatcgtggacagcaaccagaagatgcaggagtcgctgtccgcaatgacggagatccggcgcagctccggcgaaatcggaaatatcattaagacgatcgaggacattgccttccagactaacattttggccctgaatgcagcggtggaggctgccagagccggcactgccgggaagggatttgccgtggtggcagaagaagtacgaaatttggcgcagaagtcctctgctgcatcccaggacacagcagagctgatccaaaggtctctgtcagcgatccaacagggcacaaccagtatgaatgagacggcggaatatatgcagagggtagtccagagcgcacaggagatcacagagacgatccagcagatatccgaggcgtccgatcagcaggctgaggctctggctcagatcacccagggcgtggaccagatatccagtgtggtccaaacgaattccgccacagcagagcagagcgccgcagcaagccaggagatggcgaaccagtcccgaatcctgaaagagctgaccgcaaagtttcagttgagggatatagaggatgaggtggacaatgtaacaggggcagaagcacagcacggacgagcctgaccagggagagggtcgtgtcgttatgcagcgcatgcgctccttataaatgctgatctatctataagaaaccgcccggcggaaagttccgccgggcggctgtgcataaaacgggatgagatcagcgctttttgctgaaaatacgctccaggatgtcccagtcgtcgtcgctgaccacggccttctcctgggcgggggcaggctcctccacaggggcggccggctctcccgccttcttctcctccaccttggcccctgcctgggtgaagggcttgctgggcatggagctctccacctcgtcaaagccggtggcaatgacagtgacccgcagctcgtcctccaaggtgtcgtcgaaggcggcgccgaagatgatgttggcctcggggtgggcggcctcctgtaccaggttggcggcggtctccacctcctccaggccgatatccatggaaccggtgacgttgataagcacgcccttggcgccgttgatggaggtctccagcagggggctggagatggccatccgggcggcctcctccgccttgttcttgcccgcggcgcggcccacgcccatgtgggcccggccggcgtccttcatgacagcggacacgtcagcaaagtccaggttgatgaatccggtattcttgatcaggtccgagatggactggacggcctgctgaagcacgtcgtcagcgatctcgaaagcgttgaccatggtgatcttctgatcggtggccagcttcagccgctcattggggatgatgaccagggagtccaccttgttgcgcagctccgtaatgcccccctccgcctgcttcatgcggcgcataccctcgaagcggaagggcttggtgaccacgcctacggtgagcacgcccagttccttggcgatatcggctacaatgggagccgctcccgtaccggtgccgccgcccatgccggcggtgatgaacaccatatccgcgtcctccagggccttggagatctgcgtgcggttctcctctgcagacttgcggcccacttcggggtcagagcccgccccctggccattggtcagcttttcgccgatctggatcttataggttgcgctggatacggccagcgcctgcttgtccgtattcaccgcgatgaaatccacgcccttggtccccgtctttaccatccggttgaccacgttgtttccgccgccgccgacacccactactttgatatttaccacactgtcgggacccatatccaatccgaaggccattgatcgctcctcctatgtaaaaaactaggggccccacgatctgacatgttgtgggggaagccctatcgcagtctatattttgttacattgtatcgctctttttcagacaggtcaagagaaaacagggatttttcgcaaactttccagtaattctcttcatccggggctgaagaccacatcatagtcctgtcgggtcaggtccattgtcccggtctcatagctctcccgcttctccaccaccgcctccagtgcccgcagcttgtgaataaaatcgccgctgatgggcagcttcacatcgaaccggccgtcgtagcgcaggaggatctccgtccccgcagacaggtcgatggaggacaccttctccagggtcccccgctcctccagggcagcgagcagggccatcaggccctggcgccgtgtctcctccgcctgaggcaccgccatctgggtccctgcctggggggagaggacggtcaggccagtgacggtcagcgctgtgctgtcctccggagcgggctccagcagacggccgcccacgctgatgagccaagcttccccggccgccgtcccggtctcttcgggcaattcagtgtcctctgcctcctccgccgctggtgcctccgccgttgaagtcccgctggagggcaggatgctggccaccgcgtcccactcccggatctcgatggcaatggtgctgggcaggtgccggacgatggtcagctcctccacatagggcagctttcgccggatatcctctgagatctgccccttgttcagccggaacaggttgtcgcccagctggatgccggacgcctcttccacctcctgggcggtgtagcggctgttcccagcgatcaggatgtgctccacctggaagaagacggtggccccgaaggtcagggcagccaccagtgccgctccggccagcagcttgaacagcaggctgaagcggccccggtttctccttctccctcgtttgcttctggatgacatgggtctctccgttcctccgggccctccgcagcgggtgcccggccttctcttacaaaatcgtggtgatctccgcccccagggcgcgcagggcggtatccagtccgtcatagccccgccggatgtacttcagccccgagattcgggaggtcccctccgcccccaaggcggccactaccagcgcagcgccgccccgcaggtcacagccccggacgcgtgccccgtggagcctgcgcccgttgaccactgccacccggccggctacctggatgtcagcccccatacgggacagctcatctacgtggtggtaacggctggaaaagatgttctccacaaacatagtgctcccagtcccgccggccagggcggccatgaggatggcctgggcatcggtggggaagcccgggtggggggcggtgcgcactgggcggatagccctcaaggggctgtagcaggtcagacggatctcccccgccccggtctccacccggcagcccgcctcctggagtgcgcagagcaccgctgtcaggtggtccgggtccactcccgtggtcacaatctcgccccccgcggctcctactgcgcacagataggtcgcagcggcaattcggtctccgattacggtatgttccgcggggtggaggggcagtccgccctctatggagatgaccggcgtccccgccccctccacctgtgcacccatggccctcaggaactcctgaaggtctacgatctccggctcctgggcggcccccaccagagtggtccggccaggacagccacaggcggccagcaggatgttctctgtggcccccacgctgggcagggagaggcacagctcccgcccccgcatctcctttccccgccggcacaggaggctgcccccctcctcccggatctccgcccccagctggcgcagcgcgcccagatggaggtcgatgggccgcgggcccagttcgcagcccccagggtaggacagctccacctcccccatccgggtcagcagcgcccccaggaagatcacagaggaccgcagctcccccatcagggaagcggggatcaccgtcccatccagctccctcgcgtccagcgcgacggtgtccccctccctgctcaccccgcagcccagcaggcgcaggatgtccagggtagcggtcacgtcggacaggtccggacagttgtggatcacgctctctccgggggccagcagggcggcggccaggatgggcagcacactgttcttggccccttgaacagcgagccgcccccgcaggggggttccgccgttgatttgataacagctcatggaatggcctccaatccttatggattcaggtcattctatggaaaaaagaggatcttggttacttcatcagggcccggagggtccagtagatcttctcccctgcgtcgggcaccgccatagccgtcagtgcccggaccatgtcatcccggcggcggcggtcccgcagcagatggtccgctgcgtcatagagggtgttctccacacagtcccgctccagcagcagcaccgcggccccctggtcggccagcacccgggcgttcttctcctggtggttggcggtgacgttgggggaggggaccagaatcgagggcttggcgatggcggtgagctccgagatggtggaggcgcctgcccgacacagcaccacatcggcggcggccatcaccaggggcatatcatagatgtactcccgaacctcgatgcccgtgccctccagagccaggccccggcggccaatctcctcctgcatccagccatagtcccgcccggccccgtggatgtggtggaagggggctccgtcatagcattcacgggcaatgaactcgctcatcttccggttcatcacctccgcccccagggaaccccagtaggacagcagaagaggccgctcatcggtcaaccccagcttttccctggcctcctgccgggtatagcggaaaaagtcgccccgcaccggggttccggtgaccaccaccttctccgggtggtcatagtggctccggctctcctcaaagcccaccatcacccggtccaccaccttggacaatcccttggtggtcaggccgggcacggcgttggactcgtggatggcggtggggatgtgccgccgggcggcctccttcactacggggtaggaggcgtagcccccggtgcccaccaccagatccggctgaaattcgtccaggatgcgggccgcctgctgcttggatcggaccatgttccgcaccgtgcccaggttgtgggcgatatccgccggcgcgaaggagcggtgaaaattggtgatggtcaccgagcggatctcatagccctctttggggaccaggtggttttccatcccgccatccgctcccacgaacaggaccttgcagtccgggttccgctcctggaagatccgggccagcgccaccgccggattgacatgtcccgccgtgccgccgcaggtaaaaaggatattcatggtatcactccactctctcgtttaggccgaaggcgcgcgctccgacggggctgccccgccgcctgtcttcctccggatcagtcatttttgggtgcagggatctgtctggatatgctcaatacgatccccatctccgccagctggatcatcagcgctgttcctccgtagctgaagaaggggagggagattccggtgttggggatcagattggtgaccacgcccacgttcaggaaaacttggaccgccagcagggtgataatgcccacgatggtcagtgctccgaatttgtcccgtgcgtggagtgccagccagtacccccgcatgatcagcagggagaacaggagcagcaccaccaccgccccgatgaatcccagctcttccgccacgatggggaatacaaagtcgttttccggctcggggacatagaggaatttctgtcgactcttgcccagccccaggcccagcaggccgccggagccgatggccagcagggactgcaccgtctgaaagccgtccccctgccgctgggcccatgggtccagccacagattgatgcgggccgtcatatagggggtctgggtgatgatgaaccacatggctcccgccaccagggtcccgccggcggcgaaccagcccaggctgatcccggcggcgaagaggaccgaggccccccccgccagcactaggatggtgcccgacatgtggggctccatcagcatcagcagggcgatcaccatcaggatggccccatagggcaccagctccaggaagccgatgcggtccagccgctccagcgtccggccggtgagggtgcggcggctccacttcttctttttctctgtgtcccgcttggacaggcgggtggcaaaaaacaggatcaccgccaccttggccacctccgagggctggaactggatagggccgatgcgcacccagcgcttcacctcattgagctccactcccaggggactgagggccagcaccagcagaaggatagcggccacgatgccaggtacggacagcagtcggaaagtctggtagttgatcttggagacaaggaacatgaccactaccccagccgcggcatagaccgcctggtttttgatatataccagcgggtcgccgtcgttgtaataggccgtggcaaaggaggcggagaacatcatgatgagtcccacgcccaatagaagcatggtcagcatgagaaagggcagatccagcggcccccgggccagctgttcctccaccgtgaggtcgcgctttggttttcgggccacgaggaccaccccctgttctgagatactgtgacagtgacccgccggagagaaaagcgctccgccccgcccgtcacatgggatatcggttcatgacgcccaggaaggccagcacgcagaggaccagggtggcgccggagaaaacgcagaacagcttggtctcgctccagccccccagctccaggtggtgatgaaggggcgccatccggaaaaagcgtttgccgtgggtcgctttgaagtagatcacctggatgatatcagagagagtctccagcacatagatcagtcccaccagagggatgaccagggggacgtccagggcaaaggccagaccacacaccgccccccccaggaacagggagccggtgtcccccatgaacaccttggctggatggaagttatagatcagaaaggcggacaggccgcccgccagggccgcagacaccaccgtcaggtcgctgcggttgaaccaggcagacaccgccacatagaagagggcgacggggatggtgaccccggtggccagcccgtcgatgccgtccgtcaggttcactgcgttgacggtagccaccatgacaaaggcggcgaagatcatatagaccacccatggcatggccagctccacattaaaaaaggggatgtacagactcggggtcagatatccgtagttgcgcagcagcacggtgaacgccaccgccgccgccagctggaggagaaatttctgcagggccgtcagcccctcgttggcgtgatggcgcagcttttgaaagtcatccacaaagccaatggctccaaacaccagagcgaagaggtacacgaagagatagataaagttcccccgctggatctcttcccagcccgcggtcacaatggccaccccgatccccaggataaacatcagtccgcccatggtgggcgttccctgcttggacatgtgccaggtgggtccgtcctcccggatgctctgccccgctttccacttgcgcagcagggggaccaagatctgtcccgcaataaaggtcactccaaaggccacgataaagctgagaatatatgacatagctgccaccctccaggcattctttctcttgggtatcacacacaggtctgtgctcaatggcgtattattttaccacatacgcagggacttttccaccgttttctgtcccctgtccctgcttttttcccgcgccttcccgctggccgcggaaatagccggccacgacttcccgctcgtccaggtggtactggacgccgttgatctcctgataggtctcatgcccctttccagccagcacgaccacgtcccccgggcgcgcctgggacagggcccagcagatggcctccggacggtcgggctccacgtggcactgggtgtccatcccctccatgcccggcaggatatcctcgatgatatcctccggcccctcggtgcgtgggttgtcagaggtgaccaccaccaggtcagccagctcggcggccactgcccccatgagggggcgcttgccccggtcccggtctccgccgcagccgaacacacagatcagccggcccgcagtgaagtcccgggcggtggtaaggatgttctccagggcatccggcgtgtgggcatagtcgatgatgacggtgtaggccgtggggacaggcaccacctccacccggcccttcaccccccgcaccgcacgcaggggggcggccgccttgtccagcgggatgtccaggcagagcccgcatgccagcgccgccagggcgttgtagatggtaaagccgccggggatgggcagatggacccgggtgatctgcccccgggccaccgcctcgaactccacgtggccgggaaagaggcggatgttcttagcggtcaggtccgccgtgtccttgttctcagagtaggtcagggaggggcaggcgatccgctcccggtaccaccggcccgcctcgtcgtccaggttgagcaccgcacgctccgactggcggaacagcctccccttagcccgccggtaggcctccatggtcccgtggtagtccagatggtcctgggtcaggttggtgaacacccccgcctggaaggtcagtccctccacccggctctgggccagggcgtgggaggagacctccatcaccacatgggtgcatcccgcgtctgccatgcgccgtagcagcgcctggagctcatagggctccggtgtagtgcggtgggcgggcagctccagggcaccgattagattccggttggtgccgatcaggcccacacgggtcttcagcgccccttccagcatggccttgataagataggtggtggtggtcttcccgttggtgccggtgaccccgatcagggtcatctcctcccccgggtatccgaaccaagcggcggacacccgggccagggcggccctggggtctggagtggagagccagctccctgtccggggcggctcccggcacaggatggcggcggcgcccttttccagcgcctgggccacataccggtgtccgtctgtcttggaccctgagagcgtcacaaacagggcgcccggctccagggtccggctgtcatacgatatggaatttatttccatattcaggtcggcgttgccccccgtgagggggacgccggcgagcagatctcgcagcttcatggtgtcacccctcaagggtgggtttcattttctttaagaggtgccaaataaggaaagaccgccgcaaaaaatcaggtctttctccgcctgtgtcttcttatccgtcgtagaggtatccgtcctccacctgaggtgtgctgaacgtgacgtctacgatggtgccgatggccgcagtctctccgccggccacgctctggccctgagccttgctggaggagcccagataggtggccgctcccgctgcccgcatgaagaacccggcagactccagcttggagcgggccgctgtgaagctcatcccggtgacgtcgggcacggtgcccgtctcctccggctccgcgccgcccagatagaggatcacggtgctctcaccggggatgacggagccggccgcgggcacctgggcggtgactgtctcgccctcacccacggtgcgggagtccagccccttcttttccagggcagcctccgcgtcggcgggggtcatcccggtgaccttgggagtctggaggtcggccagggccgcctcgtcggcggtgtactccttctccactcccagatagtccaggatctcgccgatcagcttgcccgccataggggcacccatgttgccgccgctgatgtaagtaccggtggtgccgatgctgctcccctccgcagaccgggctggggtgttgtaggccagcaggaccaggatctgggggtcgtcggcgggggcgaagcccatgaaggacaccaccacctcgccggggacggtggtctccgaggtgcccgtcttgccgccgatggtgtagcccgcctggcgggcattcttgccggtgcccttctcggccatcaccacgctggtgaggatctcccggcacttgtcgctggtctcctggctgaccacctgccgcaccacggtgggctccgtgttctccactaccgtgccgtcggcggccgtcaccgtttggaccacatagggctggagcagcttgccgccgttgatggtagcggcgaaggctgtgatcatctggatgggggtgacggtgaatcgctgaccgaaggagcctaccgccaggtccacgccggtcatgtcaattttctcccagatattcccatcctcttctccattcaaatcgatatttgtaggctccttcagtccgaaagcctcgaaatactcataaaacttttcgatgcccagccgctggccgatctgcataaaggccgggttgcaggagttctgcaccgcctcggccagggtctgggtgccgtggcccggcgcctttttggagcagctgataggctttggccagccctccaccatgtaatagccggggcagtagaaggtatcgctctctgacaccacgccttcctccagtgctgcggccagcaccagggccttgaaggtggagcccggctcgtaggtgtcgttcaccgcctggctcctccactgcttgttctgggccgtgcctgtggcggcgttcaccgcctcctggtagatctcctcgtcggtcttgccctccgccttttcgccctgccgcttctccagctcggcctgcacatcggcctccacctgggcccgcaggctctcatcccggatggtcccgtactggttggggtcgtagtccggggagctggccatggccagcactgccccggtctgggggtccagcacgatgcaccagccgccccgctgcacgtcataggccttgatcccctcctccaggatgcgctcggcataggactggatggtggtgtcgatggtcagggtcagatcgcagccgtcctctgcgtccacatactcggagtaactgtcgtacatctccacgccggtgccggtgcgggtggtgaccacccggcccaccgtgccctccagcacatcgttgtagatggcctctacaccgtaggcacctccctcgctgttgcagaagcccagcacatgggccgccaagtcgccgtaggggtaataccgcttggtggtgggggtgaggtacaggaaatgagacagcttgttttccgtgataaaggcgcgcagctgttccgcctgctccttctcgatgttggtcttcaggacctcatactgggagtaggtccgctccaatcggtccgccagagcctcccggtccaggtccagcacggccagcacgccgtccagcaccaggtccttcttggcctggagggccgcctgataggccgtcaggtccgcattgccctcctcatccttgtatttggactcgtccacgctggcctccaggtccctgggagacaggatcaggttgtagacggtggctgacatggccagcacgtctccgctgctgtcgtagatgctcccccggaaagcagccacctccacatcccgtgtctgctgctccaccgcctcagcctgatactcctcatggtggacgatggcgatgttccacagctggccgatcagcgggatgaacagacccacgccgcacaccagcatcagaaaaaccgtgcgacggaatatcttgcgcttggagccgctctcccgtccactgcggccggtatttcgttctctgcgatcgtccatcctggggtctcctcctccgggtccgtttccctgctttgccgtgcgttccgctctgccttgataatctgaggcgcaagaaaagctctcttttcttgcgcccccttgctccgggcgcggggggagccccttccgcccggtctatctctttcgtccacccatggatcactatatgcggcgggtcaccggaaatattcgatcagactggagatgatctcctccagccccgccagcaggcccgggatgccggtcttggcgtcctcctgcccgtacaccaccacgctgtcaggctcggacagatcgatatactccacctggtcaccggtgggccggatcatggtatctcccacagccgcctggatccgctccatgtcaaataccttctcatactctgcgctgagcgtagcgttctccgtctggagggtggtcagttcactgcgcagggtcaccacctggtcagtcagcacggcgtactgggtgtagctcagcagcagcagggcggcgaacacccccactgctaaaaagccgatcaccgcgaataccgaagcctgccccgcctctcggacctggacctgggtacgggtgaggacccgctccctggggcggacccggggcttgggacggagcacctcctcccgcctcggcgcccggacagcggtgccgtcataggcgggggcgtaggccacactgccataggttcggtatgagcttagctgactgcgccggcgggtggccatggcattcactccatttctcttcagtatcctttataacacacatatcacagacgaccgcagagtcgttttttacagcttttccgctgcccggagcttggcgctgcgggcccggggattgtcccggacctcctcctccgagggcaggatcggcttgcggctcaccaaccggatctggggttttttcccgcatacgcataccggaaaatcgggcgggcaggtacagccccgggcaaactccgccatgccggtcttgacgatccgatcctccagggagtggaaggtgataacggccagccgtccccccggattcagccggggcacagccgcctggagcatccggtccaccgaggcgagctcgtcgttgaccgcgatgcggatggcctggaaagaccgcttggccgggtgctgcttctccttcagtgcccgggcaggcatggcctcccggacgatctgcaccagctccatggtggtctggatgggcctgtcctgccgacgccggacgatagcggcggcgatctggggggcataccgctcctctccatactggtacaggatgcgccgcagctcctcctgcggccactggttgaccacctctgcggcggtcatcccgccgctctggtccatccgcatgtccaggggcgcgtccgccatgtaggagaatcctctcgtgctgtcatccagctggggcgaggacacccccaggtcaaagagcatcccatccgcgccggacagggacagctcgttcaagatcctatcgatctggtcgaaattgctgtggaccagggtcacccggtcccgccattgggccagccgctcctccgctgcctccagggcggcctggtcccggtccacgcagatcagccgtccggtggtcagccgccgggcgatctcccggctgtgtcctgcccggcccagggtcccgtccagatagacgccctccgggcggatgttcagcgcctggatgcactcattcagcagcaccgggcggtgggtaaaggtctcactcatttcgtcagaaccccagtgcggccagacaggccttcatcttctccggggtcatctcctcctcttcccgggcattccaagtctcagcgctccatatctcggcccggtcgttgacgccgatgatgacggcggccttctccaagcccgcgtattttctcagcttctgggggatgacgatgcggccctggctgtccagctcgcacttcgaggcgttagcaaacagggggcgcatggcggccgactggctcatgggcagggaggcaaatttttccgtaaagcggttccaggtctcctgggggtagatggccagacactcgtccacccccatggccaggtagaaggtcacgcccagctcctcacggagcttggcagggataaagagacggcccttggcatcgatgctgtgttcataggtgccggtcatcgctctccctccccactttgatggatcttagcgggattttactccactttgccccactctgccttttagtataaaagcactttacataaaatgcaagactttttttcaattcggcacagaaaaaaaccgctgatttttcagaaaatcagcggtttttcggcacggaaactgtgtttccgcctcccgattttggtttacatcttttgacccatgcaaggcgttgtatagaccggttttcagcgcacaatatgtggcaccgcccctccgttcaggatacaccgggctttctttcctttccggggcactcttttatcccccctccgatcctcctgtctccaggcggctcttcagcagagcgtttaccgcccccgggtccgccttgcccttcagctccttcatcacccggcccatgagaaaaccaagggccttctccttgcccgcccgataatccgccgcagactggggatgctcctccaggacccgggccaccgcgccggcaatgaccctttcgtcccggatctgctccaggccgtggaccgtcacccactcctccgggtccaggtcctccgcgaaaatgccccggaacaccttggatgcggtgtttcggttgatccgtcccgcttggaccatcccgatcagcttgaccagggtggcgggtgtcagcctcatgtcctttggctccagctcctcctccttcaggcggcgcatcatgtcccccagcatccagttggccgcctccttggccggcacccccagggccgtcacctcctcgaagaagtccaccagagccttctgcccggtgatgatgccggcgtcgtactccggcaggcccagctgggtctgataccgccgcttccgctcctccgccatctcgggctgctccgcccgcagcccctccaggtactcctccgacagctccagaggcgggatgtccggttctgggaagtagcggtagtcctgggcgtcctccttggagcgcatggagaaggtggcgtccttgttgtcgtcccagcgccgggtctcctggaccacgcgcccgccctcctccagcagctccgcctggcggcgggcctcgtaggcgatggcccgggcaatggccttgaaggagttcaggttcttcatctccgtccgggtcccaagctcctgggagcccgccggccggacggagaggttcacgtcacagcgcagggagccctcctgcatcttgcagtccgagatccccagatactccaggatggacttcagcttctccagataggcgatcacctcctcagcggagcggaagtcgggctcggtgacgatctcgaccagcggcacgccgcagcggttatagtccgcccgggtctggtccagccaggggtcgtggaccagcttgcccgcgtcctcctccatgtgcagctcgtggatgcggaccaccttctcccccgccgccgtggcgatgctcacacgcccgttccgggcaatggggaggtagagctgggagacttggtacgccttgggcaggtcgggatagaagtagtttttccggtcgaaccggctgcgccgggtgatctcgcagttcagcgccagcccggcacggcaggcgtactccaccacctttcggttcaccatgggcagggtccccggcattccagtgcagatggggcagcagtgggtgttgggctctcccccgaaccgggtggtgcaggagcagaatatcttggtgcgggtggccagctccacgtgggtctccagcccgatcacagtttcccaggtcatatcatccaacctccttttccgccggagcccgcgtatgccagtctgtctccagctggaaggcgtgggcggcgttcagcacgttcttctcccccagcggagggccgatgagctgggcgcccaccggcagccccgtctcgtcaaagccgcagggcatagacagccccggcagtcccgccaggttcaccggcacggtgtcgatgtcgctcaggtacatccgcaaggggtcggacaggctctcccccagccggggggccgcggcaggagcggtgggagtgagcatcacatcacactgacagaatgcctcgtcgaaggccctcttgatcatcccctttgctcgcagagccttcaggtagtaggcgtcgtagtagccggaggagagcacgaaggtgcccagcaggatccgccgccggacctcggggccgaagccctcggtgcgggtctgctgatacagctcccgcaggtccccgtacccctccgcccgccagccatacttcaccccgtcgaaccgtgacaggtttgaggacgcctccgcgcaggcaatgatataataggtcgggatgacatactccatcatggggaaggacaggggcaccagctctgccccccggtcccgcagcacgtccgccgccgccaggacgcaggcccgcaccgcactgtccagcccctccccgaagcactcccggggcagcccgatccgcaggcccctcacgtctccggtcagggaggccagcagccccccagcgggcacatccagagaggtgccgtccctcgggtcgcggcccatcaccaggtccagcacggcggcgcagtcggccgcgtcccgggccaggggacccatctggtccagggaggaggcgtaggcgatcagcccgtaccgggacacggtcccgtaggtgggcttgatcccggtgacgccgcagaatgcggctggctggcggatggagccgccggtgtccgacccgatggcgtaccagctggagcgggcggccaccgccgccgcggcaccgccggaggagccgccgggaacccgctcccggtcccaggggttgcgcaccggccccaggaaagaggtctcgctggtggaccccatggcgaactcgtccatgttcagcttgcccagggagacggcccccgccccctccagccgctctaccaaggtggcgtcataaggggggcggaacccggccaggatccgggaggcgcaggtagtggacacccctctggtgcagatgttgtccttgagggccatggggacccccgccagggggcccgccagccgtcccgccgccagctccttttccgcccaggcggcccgctccagggcccgctccgccgtaatttcagtaaaggcgttgtcccccgccgtctcctcaatgcgctccagcgccgccttcaccgcctccgtggggctgacttcgccccgcctgatggccgcccccagctggagcgcggtgagtttcatgatctcctgcatcgtccttccctcctattccacggcctttgggaccaggaaggtccctccgtcggtggccggcgcgttcttcagcagctccccccgatccatggagggggctgtctcatcctcccgcagcacgttcttcagggggacgatgtggctcatgggctccgccccgctggtgtccaggccgtccagcacgtccatataggagaggatctgttccagctcccctgccatccgcccggcctcctcctccgacagcttcagccgggagagggcggcgatatgggccgccatttccgttgtgatcttcattctgtttcacctctctgcatgttttcaaactcacggctccaggcggctctggtcccgggggaacaggctggcctcccgcacgttctccaggccgcacagcttcatggtcagccgctccaggccgatgcccaggccgccgtggggcggcatgccgtgctggtggatggtgaggaagtcccggaactcctccgggtgcatcccccgggcctccatcttggccacctgggcctggtagtcgtggacccgctggccgccggtggtcacctccatcccccggaacagcaggtcgaaggacagggtgcagcgtgggtcctccgggtcgtccatggcgtagaaggggcgcttcttgctggggtagtgggtgacaaagacgaagtccgccccatactcctcctggaaatagcgtccgatgttggcctcctcctccggctccaggtcaaaggggtcccggatggggcggccatacttctccgcggccagccgcttggcctcatcgaaccgcacgcaggggatacggtccacccggggcagctccgcctccagccgcttcaggtcctcgctgtactcccgcgccagcagctccatgcagtatttcaaaaacccggcttccacctccatcacatcgtagaaggagtcgatgaagcccatctccaggtccaggccggtgtactcattcaggtgccggggggtggagtgcttctccgcccggaagacggggccgatctcaaagacccgctggaaggagcccaccatagtctgcttatagaactggggggactgggcgagaaatgccttgcgcccgaagtagtccagccggaagatgttgctgcccccctcggccccggcgtggacgatcttgggggtgtggatctcggtgaagccctgggcggtgaggtactcccggaaggcccggctgattccctcctgcaccttgaagacggagcgggtgcgcaggctgcgcagcacaaggggcctcagggacagctccgtgtccaggttcagcctcagccgccgcttggagacggccaccggcatgggcgcggcgggccgggacagcacccgcacctcctccgccgccagctcccggcccccgggggcccgttcctcccgccgcaccgtcccggtgaccaccgcggcacactcctcacacagcccctccggcagctcctccggccggcacacgcactggaccgccccgtcccgcacccgcagggcaaggaaggtgatcccgcccatggcccgcaggctgtggaccgcccccttcagggtgacggcctgcccgtccagcgctcctcccgcgatttccccgaaccccagggggacgtgctttgtttccgtgacatacttcatgctgatctcatcctttcctgatcgatctttccggaggaacgcaaaaatcccgggccgtatctaaaaatgatacgacccgggacggaatttcaaatcattccgcggtgccacccgcgttgctcctccaacaaggaacctctttcgagcccctctaacgtggggaatacgtgcggccctcagccggatctctccggttcgaaccgccagctcagaagtgttgcgcagctccgtctttcccaaccaggctttcagtcggtgacccggtctctctgttggacgccttggagcgcggtcttcatcagcgcttttgccatatggattttttatggtcggattatacgcttctttacttttccctgtcaatggtcattttatacagaatccgtgtccgatttttggttgcacacgaggaaattttatgctagactggcacaaaggagggggccgcgcccccggacccggatcatttggagtgaggtttttcatgatgctgaattggaacgagctggaggcccagtgcctctcctgtcagaagtgcgccctggcggataaacgcaccaatgtggtgttcggcgtaggcccccgggacgccgaggtcatgttcatcggtgagggccccggcgagaacgaggaccttcagggcgagccctttgtgggccgggggggcaagctgctggacgacatgctggagctcatcgacctggaccggcataagaacgtctacattgccaacatcgtcaagtgccgtccgcctcagaaccgggaccccctgaatacggagcaggatgcctgcatcggctatctccgcaatcaggcggccctgatccgccccaagatcatcgtatgtctgggccgcatcgccgccatgcgcatcatcaaggaggatttcaaaatcaccaaggagcacggccagtggttcgagaagtccggcgtccagatgatggccctgttccaccccgccgccatcctccgggacccccggcgcaggcccgagacctttgaggacctgaaaaagctccaggccaagatccaggagctgtgcacccacacctattgagaacgccccgccggtgggcgcggactctgcgaggtttttccaaaagctggagcgggcgccggaaactgtcgaaaaagcggctttgccgctttttcgaggagaaagatgcagtctgccgcgcgcagggtttgtccgccgcaggcggacaaaccccacacctgcagcctgagaagtgttttccccgacgcacatgccgccggggaaaacactt

SEQ ID NO: 13502 - DNA, 12611 bp, Unknown
  gut microbiota DNA sequence
ggccaaaaccttgcgatttggtcccttttttgatataataaagtgtaatgcgatccgctgttttttgatgccgccggctccttcccagggggccgctctccggcgggcccgccctctcccggccctgttttccggcgccggatctcaatccacaggaatggaggagttccatgaacccagccgctgatatctgggccaaggtactggccctgatgcagaacgagatgaccaccaccaccatcaacacctggtttgacgacaccactgcggtggaactggagggggaccgcttcgtcctctactcccccacccccttcaaacgggatatcatcgccagccggtatcttcccgccatccagaacgccctgcgggagctgttctccgccgaatttcaggtgactgtgctcaccgagggggagcttgaccgataccagcagccgaaaaaaaacgatttgatccctggaacggaggagtacacctttgagcgcttcgtggtgggctcctccaacaaatttgcccatgccgccgcccgggcggtggccgataatccagggcacagctataaccccctctacatctacggggagtccggtctgggcaagacccacctgctctacgccatcgccaactctatccatcagaacaaacccggcctgtcggtggtctacgtaaaaggggataccttcaccaacgagctgatccaggccattcgggagggacgcaaccaggagttccgggacaagtaccgctccgccgacatcttcctcatggatgacgtgcaattcgtggccggacgggcttccacccaggaggagatgttccataccttcaacacgctgtatgaggccaagcgccagatcgttttcacctccgaccggccgcccaaagagatgctgcggctggatgaccgtctgaagacccggttcgaatggggcctgctggccgatattcagcccccagactacgagacccgcatggccatcatcaaaaacaagtccatccgcatgggcatcgagctgcccgagttcctgctccagctcatcgcggaaaacattaccgccaacgtgcgccagatcgaaggtactgtgaataagatcatggcctatcaggacctgatgggggacacagtggataaggacaccgtcgtccgggcggtgaaggacatgttcaaggacaaatccgacatcgtccccaccgccgacgtgatcattgatgaggtgtgcaaattctataacatcgagcccgattcccttcggggacagggccgcaccaaggacatctccctagcccggcagatcgccatgtatcagatccgccgcatgaccaacctctccctgaaggagatcggccgggagtttgagggccgggaccacaccaccgtgctccactccatcgagcgcattgaaaagatggtgaaggagagcccggagaccgccgagatcattaaggacatcaccgccaacatcaacattcgctacgaataaagttttctccaccattccaccgaattttgtggatatgtggaaaactccctgtggatgatttttaggttttttgccccatgtggaaaaccctccagattcgttcacatcccctgtggagggccaaacccatggggccgtaaggctcacagcggttttccacattttttttgcctacgggctactattacgacaaaaatcctgtcctttcccagagagaggcgggagtcagaaggaggtcccccatgaaattttcctgtgagaaggcactgctcctgggagccgtgtccacggcgtcccgggcggtggcggtcaaaagctccattcccgccctggaaggcatcctcattgaagccggagaacagctgaggctcaccggctacaacctggagaccggcatccgggccgctgtcccggctgagatccgggagaagggctcattggtcctctccgcccggctgtttggcgagatcatccggaagatgccggatgacgtggtggtattcacctcggagaactatatggtcaacatcaagtgcggcctgtcggaattcaacatcctggggacggacccggaagaatttcccgaactgccctcggtggaggagcagaacgggctgaccatcggccagccggtgctgcgctctatgatcgcccagaccctgttcgcggtgagcgacaacgagagccgccccgtccacaccggctccctgttcgaggtggacgagagcggcctgaccgtcgtgtctgtggacggctaccggctcgcccttcggcacgagcctgtggacagcagccagggggtgctccccttctccttcgtggtgcctggctccgccctcagcgaggtggaaaagatctgcgccggggaggatgctgtctccgtggcccagggggcccggcacatccagttccaggcgggggacacggtgctggtctgccgccggctggagggggagttcctggcctataagaatgccatcccccggaacaacaccatcaagatcgagggggatgcccgcaccctgctccagtccatcgagcgcgtctccctgatcatcagtgacaaactgaagagccccctgcgctgtgtcttcggggatgggatgctgtccatcaccaccaagacgggcatcggggatgccgccgaccagtgccccatcacgggggacggccaggggctggagatcggcttcaacaacaagtacctgatggacgcactgaaggccgccccagcagaccgcctgcgcctggagttcacctccggcgtggccccctgtgtcatcctgcccgccgagggggaggagaatttcgtctatatggtgctgccggtgcggctgaaggcaaactgagaggaagattttgatgcagagcgagaccattcagatccacaccgaattcatcaagctccaggacctgctgaaattcgccggtgcggtggagaccgggggagacgccaagctcatcatccaggagggacgggtggcggtcaacggtgaggtgtgcaccatgcgggggaagaagctgcgtccgggagaccgggcggtcattgacgatgagacggaactggttgtccaatgatcgtcaagtcgctggagctggactttttccgtaactatgtccatctggaggccgtctttgatccacgggtgaacctgatctatggagacaacgcccagggcaagaccaacctgctggaagcggtggcctatctgtccaccgctcggtcccaccgggcccggtacgaccgggagatgatcatgctgggagtggatggggcctttgtcaagggagaggtgcgctcccgggcccgggacttcactctggaggcccggctgaaccggggggcccggcgccagctgtggtccaacggggtgcggctgaagacggcgggggagctgtccggcattttgaataccgtgcttttctgcccggaggacctgtatctcatccgggagggaggggcggcccggcgccgctttctggacagcgccatctgccagctgcggccccggtatgagcaggcactcagcgagtataaccgcctctatgaccacaaggtgcgcatactccgggactggcaggagaacctgtccctgctgtccaccctggacgacttcaatctccgtatggcccagactggggcgctgatcgttcactaccgggctcacttcatcaggcgccttcaggagagcgcccctgccatccaccgggatttttccgggggaaaggaggagctctccctgcggtatgagaccgtctccaccgtcacagaccccctggccggagccaaaaccatcctgccccagctgctggagcaccagcaggcccatcggcaggcggagctggacagccgtcagtgtctgtccggcccccataaggacgacttggcagtggagatcgacgggaacccggccaagacctacggctcccagggtcagacccgcacggcggccctctccctgaagctggctcagcgggaaatcttttttcaggagaccggcgagtggccggtgctgctgctggatgacgtgctctccgagctggaccaccggcggcaggccttcgtcctcaaccgcatccagggcgggcaggtgtttatttcctgctgtgaggaggaaaaattagagggactggagaatggaaagagtttccatatccagggcgggcggctgggatcaggcgcatgaccccggtctagatgcggacagaacagcaccatagaaaagagggagagctatgttccacgtcctgttggtcgctcctttgctggggctgctggcggcctatggcattgtcgtcctgatcgtactgagcgtccctttttgtctgggcggcttttttcagctggtgctcactatcgcggcgggagaccgttgggcggtctgggtgcctgcgggcctgggagtgcttggactggccctgtcctttctcttcttgcttggggcgattccatggggcggtatcctgctctactgggccctgtattttctgtggatctggcttatctggctggtcgtggcgcagattaaaaagtcagttggcagatggagagagaagcaggagagggcccgccgctgacccggataaacggggtttcctttgacaggcgcggtcttttcagacagtgccgtacatgtttttggagaaggaagaaagtgagaggcgcttatgtatctgcacctgggccagtcggtggcagtgccacatcgggagattttgggcatctttgacctggataacgccagctgggcctataagacccgggaattcctagagcgggcggaacaggagggccgagtcatctcggtgtgcgatgacctgccccgctcctttgtcttggtaggggaggagaaggggacggccacagtctacatctctcagctgtcctccgccgcactgctgcggcgggcggagagcaatttgctttgaatcatgcagaatgatggaatgcagaatgcagagtgaagaagcccggtcctccgggcggaacaagtggatatcggaacggcagggaccagcggagagagcctcatctctcccgcttctgtattctgccttctgcatttcgatatggaggttattatggcagaagaattggaactgaactccacccaggtggagcacgagtacggcgcctcggagatccaggtgctggagggactggaagcggtgcgcaagcggccgggcatgtatatcggctccacctcggagtcaggtctgcaccacctggtctatgaaatcgtggacaactccattgacgaggccctggcgggctactgcaccgacatcacggtgaccatcaatcccgggaacaccatcactgtcactgacaacggccgcggcatccctgtggatatccagccccaaaccgggcgtcccgcgctggaggtggtgttctctgtcctccatgccggcggcaagttcggcggtgggggctacaaggtgtccggcggcctccatggcgtgggcgccagcgtggtcaacgccctgtctgagtggctggaggtccaggtacacaagaacggccagatctatgagatgaagttttcccggggaaagatcacccaggagatgaaggtggtgggaaagaccgaccatacgggcacgaccgtcaccttcaagccagacccggagatgttcgagactctggagtacaactatgacactctccacacccggatgagggaggaggccttcctcaatgctggcctgcgcatccagaccgtggacctgcgccccggccgggagcaggaggacgatatgtgctacgaggggggcatccgggaattcgtcaccttcatcaaccgaagcaaggacccgctgcaccctgacgtgatctatatgtccggcaaccgggaggactccatggctgaggtggccctccagtacaatgacagctataacgaggtcatcgtctccttcgccaacaacgtccatactccggagggcggcatgcatgaggagggcttcaaacgtgccctcaccaacgtgctcaacgcctacggcaagaagatcggcgtgctgaaaaacgatgacaaagtctccggcgacgactgccgggagggtctcacctgcgtcatttctgtcaagctcaccgacgcccagttcgagggacagaccaaggccaaactgggcaacagcgagatccgcaccctggtgaacgccattgtcagtgagaagctggagatctatctggaggagaacccggcggtgggccgggccatcttggacaaggccctcaccgccaaccgggcccgggaggccgcccggaaggcccgggagtccatccgccgcaagaccgctctgggcggggccgctatgccggacaagctgcgggactgcaacgaggccaaccccgagctcaccgagctctacatcgtagagggcgactccgcaggaggctccgccacccagggccgggactcccggttccaggccatcctccccctgtggggcaagatgctcaacgtggagaaggcccgggcggacaaggtgtacggcaacgacaagctcacccccgtcatcaccgccctgggggcgggcatcggagacgagttcgacctgaataagctgcgctatcacaaggtcatcatcatggccgatgcggatgtggacggtgctcatatccgcaccctgctgctcactttcttcttccggttcatgcgccccctcatcgagaatggatatgtctactccgcagtgccccctctgttcaagctgacccggggcaagcagatccgcctggccttcagtgaagaagagcgggataagatctccgccgagctgagaggggacaatcccaacgccaaggtggatatcagccgcttcaagggtctgggtgagatgaacccccatgagctgtgggagaccactatggacccggagaagcgcaccctgcgccgcatcgagctggacgacgccgtccgggcagatgaggtgttcaccgtcctgatgggcgaaaaggtggagccccggaaggagttcatcgagcgcaacgccaagtacgcagtaaacctggattactgagaagagcggacgccgggcggcctgtctccacactttgaccgcggcggctccgcactgatcgtacaggttgaatccatgaaggtggaggaaagttaagatatgagcaaaaaaccccaatatgatcctgaggagatccgtttcccggaccagaagatcgagatatcccctctggtgcccgagatggagagttcctatattgaatatgccatgtccgtcatcgtgggccgggccctgcccgacgtgcgggacggactgaagccggtccaccgccgcatcctctacgccatgtatgaggacggcctcaccgcggacaagcccttcaagaagtcggccacctgcgtgggcgacgtgctgggacgctaccatccccacggggatcagagcgtctacgacgccttggtccgcctggcccaggacttctccatgcgctacatgctggtggacggccacggcaacttcggttccatcgacggcgatccccccgcggcctaccgttacaccgaggcccgcatgtccaagctggccgacgagatgctgcgggacattgagaaggacaccgtggattgggaccccaactttgacgagacccggaaggagcccaaggtgcttccctcccggttcccaaacctgctggtcaacggctccagcggcatcgccgtgggcatggccaccaacatcccgccccacaatctgcgggaggtcatcaatgccgtcatctgcgtgctggatgatccggaggctcagctctccgacctgatggagcacatcaagggccccgattttcccacccggggcatcatcatgggccgcagcggcatccgttctgcctacgccaccggccggggccggctgatggtccgggcccgccacgaattcgaggagttcggcaaggaccgggtgcgcatcgtcatcactgagatcccataccaggtgaacaagcggatgctcatcaagaacatggccgaccaggtggaggacaagcgcctggagggcatctccgacatccgggacgagtccgaccgcaacggtatgcgcatcgtcatcgagctcaaacgggacgccaatccccaggtggtgctcaaccggctgttcgcccagacccagctccagaccacctttgccatcaacatgctggccctggtggaggtcaacgggaagcttcagccccgcatcctctccctgcgccacattctggacgagtacatcgcctatcaggagcaggtcctcatccgccgcacccgctttgacctgaagaaggcccaggagcgggcgcacctgctggaagggctgctcatcgcggaggacaacatcgacgcggtcatcaagaccatccgggagagctacgacgacgccagggagaacctgatggcccgcttcggcttggacgaggtgcaggcccaggccatcctggacatgcagctcaagcggctccagggtctggagaaagagaagctggaggcggagtacgctgaactggagaagcgcatcgcctactataaccagcttctggctgacgagtccatgctccggggcgtgctgaaggacgagctctccgccatccgggacaagtatggggacgagcgcttcaccgagatccaggatgtggaggacgagatcgacatcgaggatctgattgaggaggagcagtgcgtcttcaccctgacccaggcgggctacatcaagcgcaccccggtcagtgagtatgccgcccagtccaaggggggcatgggcaagaaggggattaccacccgggaggaggactacgtggtggacgtgttcaccgcctccacccacgactatatcctcttctttaccgacacgggcaaggtctaccggaagaagggctatcagatcccggaatctggcaagacggccaagggcaccaatatcatcaatatcctccaggtggagtcgggagagcgggtccagaccatgatccacacccggtccatcgaggacgacggccgcttcctcttcatggtcacccgaagcggcaccgtgaagcgcctgcccgccaacaccctgaaaaacctgcggaacaacggaatccgcgccctgcgcatggatgagggggaccagctgatcgccgtgcgggagaccgatggacagcagcgcatcctcatcgccacccacgacggcatggcggtgtgctttgacgagaacgacgtgcggcccatgggccgggaggccgtgggcgtccggggcatccgcctgcgggagggcgactacgtggtgggcgccgcccgggccaaggcggaccatgaggtgctgtccatcaccgagaagggctatgggaagcgcacccccgtggaggagtaccgggtcaccaaccgtggcggcatcggcatcaagaactatatggtcactgagaagacagggagcgtggtgggcatcaaggtggtggacggcagcgaggacctgctgctggtcacccagagcggcatcctgatccgcacccctgtggacaacatccgcaccgccggccgggctacccagggcgtcatcgtcatgcgcttcaaggaggagggggaccaggtcatctcccttgccctcaccgaccgggaggagaccgccggcacccaggagacggaggagggagaccccgccggggagagggcggaggaggcccccatttcggaagaaaaccagtccgaagaggaataaccagaatataaaatacaattaggataggaggagagggcatgagccggagaagacggggacggatcaccgtccagagccagcctaccggggccacccgggcagtccgccgcatggcaggagtggtacaggtcatttttggccttgtctttgtggtagtggcggtcacccagatcatgccgctgtcgcccctcttttccctgcctttcctggccatgggcgctctggctgtggtgatgggggtcctgagcgccgttgggaaaaacggactgccccaccgggtgggctatgacgtggagaccgggatcgaagaggagaccatcgccggtctgatggaggatgtggacaaaacggaccgcccctccgccgggacccacgaccacatcccttccaccgccctggatgcgggagagcggctgaagcagctggaggatctgaaaaaggccgggctcatcacccaggaggagtatcaggaaaagcggcgtgagatattgagccgcctgtgacggaaaaaggaggacaatgccatgaaactggccaacgcgctgtccctgcgctcggagctccagacccgcatccggcagctggagagccggctggacaacaacgccctggtccaggagggggagtctcccgcagaggaccccatggagctgctgagagagctggaggaggactatgcccagctggaggagctcattgcccggatcaaccggaccaacagcaccacagaggcgggggaggggaggaccctctctgacctgctggcccgccgggagtgcatgacaggccggctgcgcatcctgcgggacttcctgaacagcgccagcgccgtggtcaaccgccggacggtgggtgagatccgcatcaggagcgcggtcaatgtgcgagagctgcagaagcaggtggaccgggacgccaaggcactccgggagctggacgagaccattcaggagaaaaactggaccaccgagctggtggagctgtaaaaaagagctgccgggagggggaagagcgccctctcccggcactttggcagcgcggaaggcgggcgtcaagctctcagtgccggagccattgggcacacagatttggcaacgagcggggccattcgttgggttcgactcccaatttatgataatgcccggtacagttacaggggtattattacgatttgtattgatgaccggacgccgattccacgcgggtgggttaggggatcaaaaaaccttctccccacaggggggaagatggcacagaaaagccgtgatggatgagagggagaagcgtaagatgcacccagagatcaaagccttttcccaaaaactccgcagagaagccacgccggaggaacggcggctgtggtatgaatttttaaagcagcatccagtccaatttcgcagacaggtcccatttggaccatatattttggacttttactgtgctcaggcaaggctggggatcgaattagatggagcacagcattacgaaaaggatgcacttgagtatgaccagatgcggtcccattttttgcagacaaattttcaaatcgaagtgctgcgttttacgaatttggatgtaaaacagaattttgagggggtctgcctcacaatccgccgggcggtggaacggaggtccccctcatccgccccctccgggggcaccttcccccctgtggggggaaggctacacggacaggaggcgaacatgaaaacagtcaccatctacaccgacggggcctgctccggcaatccgggccccggcggctggggggccatcctgatgtatggcccccacaaaaaagagatatccgggggagagccccagaccaccaacaaccgtatggagctcaccggcgtcatcaccgcgctggaggccctcaatgagccctgtgtggtggagctgtactccgactccaagtacgtcatcgatgccctggaaaagggctgggccaagggatggcgggcccggggctgggtgaagggggacaaaaagcccgccctgaatccggacctgtgggcccgcctgctggacctgtgcgaccggcaccaggtgaagctccactgggtaaagggccacgccagcaacccatacaacaaccgctgtgacgagctggcggtggcggagagccggaaatacaaataagacggccccgtgccgccccttagaacagttcaaaacagccctctgggataaatttttatcccagagggctgtttttatggttccggaatggaggggtctgcttcatcccatcctttgggggcctcctgctgcccggaggcccggcatatcacgttttccagaccagcctgcgcccggagctgaaaaatttcatcagacagggcatgcatcttctggatcatggcgttctggatctggacgatctccccgaagcggatcagacaggtctgcatggaggcggtgatctctgtctccagctcatccgccaggacgtctatttttttgattttttcaaaataatcttcgtctgtgattggcataaagcgacctccaaatttcttttataccaatttagtataaatttcaaaatacgctttttgcataatctatgataatggcgaggtgagaccatgccattacggattcgggatttgcgggaggacagcgacctttcacagaaagagattgcgaagtttttacatgtcagtcaagcgacctattcccgctatgaaaatggtgaacttgaaatctccattcctacgttgaccgcattggcggatttctatcatacaagtgtggattatttactggggcggacgaattgcagagatccacaccccagatgaaagggctctggtttattgtacaatattgtggtgtgtaaaatattagaatatactgtttcggaatatagtgtgtaaaaatcaacgtctgccctcttttaggcaggcgttatgattttattttttcatcgtg

SEQ ID NO: 13503 - DNA, 127865 bp, Unknown
  gut microbiota DNA sequence
gtctcaaaagtgtttcatatctgtctcgcgatacaaaaaagaggaccatcagcaaatttgaaaggcaggaatatttggcttgaactgcccgctgccccgtacagaaaagagaagcttggtgccagagcaaaaaaatgcccccgctgtgtacacagcgggggcatttcggagagaacttattcaatggcaatgcggttttgagtgggcagggtctgctggtccttcttgggcagggtcagcatcaggatgccgctgtcatatttggcattgatctcttcgggctgcacatcgcccacatagaagctgcggctgcaagtgccgctgtaccgctcctggcggatgtagcggccctcctggtccttctggtcccggtccaagcccttggcggcctgaatggtcagatagccgttttgcagttccacactgatttcatccttctggaagccgggcaggtcgatatccacctcgtagtggtccccagtctccttcacgtcggtcttcatcagattcttggcgtgcttgccgtataggggattccgggcgccgaacaggttcttctcccagggctcatcaaagaattcatccaacaggttctcaccaaaaatgctaggcaacataagtcattcctccattcgcgatccttatttcgtgcctgccgggggacctctcaggtccccctctttcttggtacgcccttagtatagcactgaaattagcgctgtcaagcagagagtgctaaaattcataaagtgttcacaagatattgcaaaaaaagacataaacagaacgaaaatggaagaaatattccgaaaaagttggggtggtcagaggggaggcaggggaaacccctgcccctgggcgcgctggagaccaagctccatcaggcggcggtccgtgtccagggtggcgggatagggccagcggggcgcacagtgctggaactgacgccaggacagcagggcggcctccgggtcccgctgggccagcagagcccagaggaactccatgcggctggtggagggggtgaacttccgggtagccttgcagtaatggagaagggcaggggtgcggaggggggccagctcctcctgggagcggcccaggagcagggagcaggagagcagatccaccgtcaggtcccaccgctggatgtccagcaggccagaggggacgtccagcagggttcggaaagcggcttccgccccggacaggtccccctggtccatgagccggctggggaggaaggatagggcggcggcggtaaaggggtcctggggctccaggtcctgggggagctggaaccagcgggcgggctggtcccggagggggatgccccgctggaggagggcgtggcaccgcagctggagggcgaaggtccggcgggcctgggggctgcgggagagcaggtgcaggttgaagccgtcgttggctaccccgtccatggagagagggatgaggttgacggcccccagaaacaggccggcagctgcaaagatcagcaggaagaccggccagggaaaggggaggagaaaggcggtcagggccgccgccagggcggaaagcagattggccaagccgcccccaagattataaagccggaaggggacctcgtccccgtctgggggctccagcaggcactggccgccagtgccggggaggtagaagcggcgcaggaccaggcggccattctggcggagcagggtgaaagagcccacccggaaggagaggaagcggtagccggagagcaggccgcagaccaggtgaccgccctcgtgcaggatggcctggagccagaaggagaggatcaggcaggccagggagggcagcaggacagtcattccataggggtccagagcccacatgaagaagtagccccctgcggcccccagaagggcggcagggataaggacagccagcttccgccaggggacggtgtgccgcttcaaacgatcagtcctttctgttgtgacatgtcgaaaaaatacaaataggagagaaaagctcacccctccgcccagtcctcatagggcacaaaggtaaatgagatgtcccaaggctgctggtggtagaccagatagacgatgtctcccttgcctgccatctcattggcggtgaactggggaaaggggaccaggggcagggtgatctggctggcgcctccgtcagcctgggcgcgggcggtgtccagccgatggacccagacggcagcgttgcaggcatacactgccaccagcaggaccccagcggcggcagccgcccgattcaggcgggtgaggggccgcaggccctctgcccgggcacgtcggaagagcactgacgcggccaggcacagaaacaggtagctggagaagaacatccgggcgttcaccggggagaccaccagcatggggccggtgaccaccagcagggaggccacccagaaccagagctcccgcctgtccgcgccgccccgccactcgaccgccaggatcagccagagcagggccagagccaggcccagccaaagacattcctcccggtacaggtcccgccgcttcagcacgaccagaaggcggtcatagccgatgtagaggtggagggggaggaggaggcaggcccacagcctccagcgggggcagccctgccgccgtaccagccacagcagcaggaggctgatggtcaggcagaggggaatggggcggaggaggacctcggtaaagatgacaggcaggttgtcccgggccagatccagccccaccccccgcaggccgctgtccacctgagcgaagacggagttggtcatgctcagggccagcccggcccagctgcctgccagcagggcggcccggagagacggggcgggcaggaggccccggagggcggggaccagtccggccagagccatagcggaggagaggaggaccagataggcggtattgtgctcggtgaacagaccgatggacagggagaggagcaggacgaggggccagcggtccggccgcccctggcggagcaggagaagcagggggagcaggagcagggtgggggccagatagttggcccaggccgcagaccagctgtacacctgctgccagatgccccagggggcccataccaccaggaagagggccagggcaaaggattcccggccgcctgccggcccgccctggaagaagcgggagaggagcagggtgagtcccagcatcccgccccccaggatcagcacccggaggggccagaggggggaaaacgccagcttgcccaggatcagccccagcaggttgcccagataccggccgttggatgggacgcccagcaccacgccctcctgggggatggggcggaccagcaggaagtccttccaggaggcgaagtcccagtagatgaagtagcagtcgtcgcactcagggacgaagaggagggcgaggagcaggaacagggcggcggagagcagcacgtcccagcgccgccggcgggtggtcatggagaggcctcctttcgggggatgaaaaagcggccccagccgccggtcaggccgggggaggggccgtttgttcgctttgggtgttctggcgtggaagggggatcacttctggccgcccttcagggccttcatccggtcgccgtggtccaggatgcgcttgcgcagccggaggttctccggggtgcactccagcagctcgtcgtcagccaggaactccaggcactgctccagagacatctggcggggcgggatgaggcgcagggcgtcgtcagagccggaggcccgcatattggtcagctgctttttcttgcacacgttgacggagatgtcctctgccttgggggtctcacccacgaccatgccggcgtacaccggggtgccggcgccgatgaacagcacgccccgctcctgggcgttgaacaggccgtaggtcactgcctcgccggtctcgaaagccaccagggagccggtgttccggcgctggatctcccccttcatgggggcgtaactgtcaaagacggaggccatgatgccctcgcccttggtgtcggtaaggaactcgttgcggtagccgaacaggccccgggcggggaccaggaactccaccttcatccggtcgcccacgggggtcatctccaccaggtcgcccttgcgggagccgatcttctccatcaccgcacccacacagtcagagggcacatccactaccaggcgctcgatgggctcgcacttcacaccatcgatctcctgatacagaacacgggggggagagacctggagctcatagccctctcggcgcatggtctcgatgagaatggacagggacatctcaccccggccggccacgttgaaggcatcagtgctgtcggtctcggtcacccggagggagacgtccttcatggtctcccggatcagccgctcccgcagctggcgggaggtgacgaatttgccctcccgtccggcaaagggggagtcgttgacggagaaggtcatttcaatggtgggggcggagatcttcacgaactcgatgggctccaccgcgtcgggggcgcagatggtgtccccgatggtcacgtcgccgatgccgctcatggcgatgatgttgccggcggtggattcggtgacggggaccttgcccaggccgtcgaactcatacagcgcggtggccttggccttcttgggggcggcgtcggggtcgtggtagttgcacaccgcgatctcctggttctgcttgatggcgccccgctcgatgcggccgatggcgatgcggcccacgaactcgttgtagtcgatggaggagaccagcatctggaaaggggcgtccacgtccgcgtcgggggcggggatatactccagaatggtgtcgaacaggggcttcaggtcgctgcccgccacatcgggctggacagaggccgtgccctgacggccagagcagaacagcatgggggagtccagctgctccggggtggcatccaggtccagcagcagctccagcacctcgtcgatgacctcgtacacccgctggtcggggcggtcgatcttatttactaccacgatgacccggtggcccagctccagggccttggacagcacgaagcgggtctgaggcatggggccctccgcggcgtccaccagcaggatgacgccgttgaccatcttcaggatgcgctccacctcgccgccgaagtcggcgtgtcccggagtatccacgacgttgatcttcacatcctgatactgaatggcggtgttcttggccaggatggtgatgccccgctcgcgctccaggtcgttggagtccataacgcgctccaccacggcctgattttcccggtacacgccggactgcttgagcatctcatccaccagagtggtcttgccatggtcaacgtgggcaattatggcaatatttctcagtttttcgttcttcatcatttttcctcctaccagcaatatggcaagaccactcggggccccatcgccgatggggcgcgccgaatggcgcgtacaagcttttgtccggaagaaaaagcttgacgcaggcggaatttatttccgccaagcatttaaatatctggggtccctgcggggcatcaggcccgcggggcggccataccgtggccggcgtgggcgatcatggcggcacgtctctgtttttcgcgctttgcggccgcttctcatttaaagacacaaaaccatatgagacgccggagaggaggctcaaatggcggatcgccgcagatcagcgggaagcgctccccaaaggggaggtgttcgtgttgacgtaatattatacagcgccctttcgagaaacgcaacattttttgcagaaaaacaggaaaggatctatttggatccccgatttgacacggagaagcggaaaaataggagaggatattgtgatttcgccaaaaatttgaggcgggaaaacggggggcacaggggcgcccacggatagagtggggaggacgggacaggggccacaagatatcgtgaaaaaaccggaaaaagacgagaaaaagaaataaaaaatttacatttggagaggagaaaaaggggttgacgtaaagcgggattgcgtgtatagtacgtttgtaaccaaattgtaacattttcttttccgttctgtcacttttggggcagcgggaaatttgatctggaagaggtcatgattcatggacgaggttttgcacaagcccgccggccgccggccccggcagagtgacggtcgggagctgtcagctcaggagcagctggggctgctggcgcgccgggtggtcacagattggaagcatttttatcagtgggcccggttccatggccgccgtgtgatccacacggtccatgacctggcgggggggaaccgcgccaccggtccggtcacctttctggcggtgtccggagcgctgggactggcgctgactgtctccaccctatacgccccggcctatactgtcacggtggacgaggatactctgggtgtggtgagcgaccaggctgtggtagccgacgcggtggctcaggtggagcgccgaggcacggagatcctgggacacgactaccaggtggaggggcagatcggttatgatttcaccctttccctgcggtctgagctgacccagcccgaccaggtggagaactacttcctggagcagctcagccaggtagccgatggcctgcgccgctatcaggtcagcgtcaacggcgtggcggtgggctccgtggaggagatgggagccctggagtccgtgctggaccagctgaagggccagtatgtgaatgagaacaccatctccgctgaatttgtggatgacatccaggtggaggatgtctactcggaggaggggcagatgaccgccgaggagctccagaccgccctgatggccaacaccactggcgacaccacctacacggtggtgaagggagacaccttcaacgccatcgcctatgccaacgacatgtctgtcagcgacctgaaggcgctgaatccgggcatcgatatcaaccgactgatgatcggggacgtgctcaatgtgaaggagcagatccctctgctgtcggtgaccacggtggacgacgtgacctataccgagcccatcgcatgcccggtggaggaggtgaaggactccagcatgtatgtgggggactcgaagatcctgacccagggtacagagggcgaggcccaggtccacgcccaggtgacctatgtgaacgggagcgagacccagcgggagatcctgtcctccaccaccctgcgtgagcccaccacaacagtcaaggcggtggggaccaaggagaagcctaagacagcctccactggaagctactcctggcctatccgggggcggatcacctcctactttggcgggcggaatattttcggcagttacagctaccactccggcatcgatatctccgcctcctacggtgcggccatcaaggcggcagacggcggcaccgtcaccttcgccggctacaaggggagctatggctatctggtcatcatcacccacgacaacggcacccagacctattacggccataactcttccctgttggtgtccgcaggacagaaggtgtacaagggacagcagatcgccaaggcgggcagcaccggccggtccaccggcacccactgccactttgaggtgcgggtgaacggcacctcggtgaatcccctgtcctatctcagctgaacgaccagaaaccatttgggctccggcacaggaaaggctgtgccggagccttttcatgcccctttgtacatgcggaataacgggggaataagaaaagtcccgccgctcaggagcctgagcggcgggacttctgatcgttagtcagaaggaaagggggacccgatcacagatggatggcctggaccaccttggcgcaccgggggcacagggtgggatgggccgcattggcacccaccagggggtggtgcttccagcagcgctcgcacttgtctccattggcctcgctcaccagtacccgcacaccggcgatgggggtgtcgctcccctgggcatacagagccgggtcgtccgacacctccacgtcggagacgatgaacaggtcggcccactggtcctggaacttctcctgaagggcggtcaggttgtccgcctggtcctgggcccgcaccagagtgatgtgggcctccaggctcttgccgatcttcttctcgttccgcgcggcctccagggcggcgttcaccccgtcccgcagctggatcagagcagtccaggagaccaacgcgcccatgtcgtagtcctggaagggctggttcatctcattgagaaccacattgcgggggtcgtcaccctcccggtgaggcatggcctgccagatctcgtcgcaggtgaaggccaggatgggggcgaacagcttagtaatggtgtccaggatcatccacagagcggtctgagcggagcggcgctccaggctgtccactccctcacagtacagacggtccttgatgatgtccagatagaaggagctgagctccaccacacagaagtcgttgatggcgtgggagaccacatggaactcgtagttgtcgtaggcggcaaagcactttcggatcagctcgttgagcttggtcaccgcccagcggtccagctccagcatctcctccggggacaccaggtgatcggggtcaaagccgtccaggttgcccaggcagtaccgggcggtattgcggaacttcagatagttctggctgagctgcttaaagatgttgtccgaacagcgcacgtccacatggtagtcggcagaacccgcccacagccggagcaggtcggcaccatacttcttaaagatctccgcggggtctacgccgttgcccagggacttgtgcatagccttgccctcgccgtccacggtccagccgtgggtgacgcactcctggaagggagcccccttgcccagcgcgcccacggcggtgagcagggaggactggaaccagccgcggtactggtccagaccctccatatacatgtcggcgggccagaaattctggtccttctgcatggaggcgaagtgggtggagccggagtcgaaccagccgtccagggtgtcctcctccttggtgaagcccgtccttgagccgcagtgggggcaggcgaagtcctctggcaggatatccttggcctccatctcataccaggcgttggagcccttctcaccgaagagcctgctcacagcctcaatggtctcgtcggtgacgatgggcttgccgcagtcggcacagtagaacaccgggatgggcaggccccagcggcgctggcggctgatgcaccagtcggcccgctcccggatcatggagatcatccggtccttgccccaggcagggagccaccgaacatcgtcgcaggcggccaccgcctcgtccttgaaggagtccacggaacagaaccactggggggtggcccggaagatgatgggttttttgcagcgccagcagtggggataggagtgaacgatctcctcactggcgaagagggctccgctctccttcaggtcggtaaggatgaccgggttggactcctccgtcttcaggccggcgtacttgcccgcgtagtcagtgtggcagccctggtcatccacagggaccaccagctccaccttgtagcgcttgcaggtctcgtagtcatcggcgccgaagccgggggcggtgtggacgcagccggtgccggaatccatggtgacatactcggcgcagcacagcagggattccttatccaggaaggggtgctgggccttcatatactcgaagtcctggccgcggaactgcttaacgatctcatagtggtcaaagccgcccgcctgcatcaccttggcgcacagggcctcggccacgatgtagagctctccattgtccgccttgaccagcacatagctctcccgggggtgaacggcgatcgccaggttgccgggcagggtccaaatggtagtggtccagatgacgaagtacatgttggacaggtcgccatattggctcagacggcccagatcgtcctttacccggaacttcacatagacagtggtgcaggggtcgtcctggtactcgatctccgcctcggccagggcggtctcgtcgtgggggcaccagtacacgggcttaagccccttgtagatgtagcccttgcggtacatggagccgaagaccttgacctcctccgcctcaaagccggggtccatagtcttataggggtgctcccagtcccccagcacacccatgcgcttgaagccctccatctggatgtcgatgtatttctgggcgtagttgtggcaggcggtgcggaactctgccacgctcatcttcttgcggttgagcttctgctccttgatgatggcggactcgatgggcatgccgtggttatcccagccggggatgtagggggtatagcggccccgcatggcgtacatgcgggtgatgaagtccttgatggacttgttcagggcgtggcccatgtgcagattgccgttggagaagggagggccgtcatggagggcgaagcggggtttgccctcattcttcttcagcagctcgtggtacaggtccatgtcgttccagcgctggagcatcccgggctcccgattgggcagaccggcccgcatggggaagtcagtcttggggagattgatggtcttgttgtagtccatgggtttgcttcctcctattctgggtcttttttagacttttcgatcaaattacatagaaatgtgaccaggccacacgcccggcagagcatagcgtggggaaattccggaaacgggtcccgcgtgaacatactggtggtgtcatcacctggggggcccagttccaccatatccgtggggctgtgaaaaaaccgcaattcctgctgggtccagaagggatatttttgcgtgtgcatggtcccttcttccataagaaggccgcacttagggcacttcatcaaagccactcctctctggaaaaacaaaaacgcccttgtctctcaaagagacaaaggcgaacaagacctctgcggtaccactcttcttgccggaagggcatcccgtcccagccactcaaatgctgcccggtaacgggggcgtccggaggggcttactcaggttcagcccccctgctccaaggtgatcttccccagcccctcccgtccgccttgcaccaaacggcggctctctgtgcgtctcggaggcgggtactcttccttttctgcgcatgataacgatatacccttgtattctatccactttattgaggaatgtcaagaattttgttgaggattttcatgtctagcacgctccagtcataggtgcgcagagcgccccctccgcacggcggagggggcgcttccagtgtatctctgcgatcttatttgatctcatagtcccggccgaactggaggttgccgaagtcgatgcggcgggtgccgtggaccggctcctcctcaggctcctcctccgcctggggggcgggggggaactctgcagtgtccgacaggtcctctgggccctccgcagcctcctgggcggcctgggcctttagattctcggcggtggcgtctgccatggcctgggccaccaggcgctggacattgtcatcgatctcctccacggcctcttccaccgggtcggcctgggagaccggggcgtcggggcacagctgggaaaggccgtccaggtagcgcagctcctgctcgtggagggcccgcaccttggccacataggcagcggtggcggattgggcggcggacagacggaactcctcgtcgccggcctgcttgcggatattggccacccgctccttggcctccccttcggcgtcggagaggatctgggcctttttggcctccgcctccttcaccagctcgtcggccatccgctgggcggtcatcagcgccttgcgcatggcgtcctcggtggcgcggtactcctccaccttctccaccaggaccttcatcttgctcttcaaaacggcgttctcattgtacagtgaggtatagtccgctgtgagcagatccagaaattcatccacctgagccatgttgtagccgccgaaggaagccttgggaaaggcgcgctcggagacctcctgaggagtgagcatattcattacctcctaaatcaaaacgcttttttcagcgcaggacctcgtcgtcgttctgggcgcgccagtcaaaatactgctccaggaccacgggagtgccgtcgtcccaggtgaggtgggtcaccagatagcccatcaagtccgacagggcctgtccgtacagccgctgggccgtccagataccctcttcggctgggagcagggcatagatatccccctcctcccaggaggcgggggcgcagggccaggcgagagtcccgtccgcctcatagagcggtccctctccccgcagctccagccattggagcaggtccagcgtctccacggtgccggtctctggtacggtgatctgggcggtcatgccggcctgaacgctctggatagaccagagggggagctccaggacctgaaaagctcccttgtcataggagaggacatgcacttccagcatgccggccccggccccattggactgtgggatcagaccggccaccaccagggacgcgccctgccggtcctgaatggagaagaacaggggctgatcctgctggggagaatagtaataataccggccattcaggtcacaggtgaccaagtcatccccaatctgggcctctacataccagcggaacagcagattccgggaatccgagccctccggcggcagcgcctcagggggcaggtcgtccgcggcctgaagggcatacaggcggacggcctcctctgcgccgtctccgtccagatccatggagaggcagccgtgctccatgaggagcggggcctgcggctcctcgtcttcggaggcggaggcggcccctccgccggcgcagccggacagcagggccaggagcaaaaggagggggaggagccggcccggcggccgaacggcgacgcgtcccatctgctcagaagtacagcccgttgttctccagctcgtcgatcagatcccccaggatgtccacattgtagggggtgatgatataggtggagatggccaccttcttgatcttgccctcgttggcataggccacgccggaaagaaaatccagcaggcggcgggcgatctccttgttggtggactccaggttgagcaccacggtgcgcttctcccgcagatggtcggcgatctcgctggcgttctcaaagcgctctggctttaccagcaccacctggagctgagtagtggtgtgaatattgacgaccttgttgctgcggcgctccggctcgaccggggcgctgtacaaagagcccgtgcggtccatccgctcggagcggtcccggcgctcagggacggcagcacgaggcgccggctcaaactcctcgaaatcgtcctcgtcctcatcctcgtaggggtgggccaagcgcttgagttcatccataaatcccatagcggtatcctctcttttccttggtgtaagctctgccgccggttcaacgggcggtgtgcatgggcggccgggggccgaacagcgcggtgccgacccggaccagcgtggccccctcggcgatggcgtcctcaaagtcgccgctcattcccatggacaggcaatcgatatcacattgattatcggacatttcgcgtcttatgtcaacaaaaagctgatacatttttgcaaaaaaaggccgattggcaccggggagggggctgataggcgggatggccatcaaaccccgcaggcgcacatggggcagggactgagccagctcagccaagggacggagctgggccgggtccaccccgcccttgctctcctccatgccgatatttacctccagcaggatgtcctgaaccaggcccagcttgtccgcctgggcctccacagcccggagcagatgctccgaccccaccgactggatcaggtccacccgtcccaccacctgcttgaccttgttggtctggaggtggccgataaaatggacccgggcgccctcataggcgccggcggccaggtgggcggtgagttcttggacccggttctctccgcacagggtgatgccggcggcgatggcggcgcggatggtgtcgtcgctctgcaccttggtggcggcgcacagggcgatatcctccgggcggcggccggacgactctgccgcggccgccatgcgggcccggactgcctggacctgctgttggatggacatatgcaatctctctctttctctacaggtgacgggctgccggatgggcggccctcagaaattcagcaatttcccgtcatagagcccggtggcccggacgatgacctcgtcccccgcccgcaggacggcccgcccctcggtggcgggggagaccacatagaagtcggactcctcggtgaggatctccaccggcttgaattctgcccggccgcccaccagggtatagacccccaccaggttggtctggacggtctcgccggtctccggatcggtggactcctgggtgaccatgcgcagagcggccttggggatgcgcaggccggagctgctgccgaagatgagctccactgtctggccgcggagcagagtgatctgggacaaatagcggttggaggagaggaccaccaccgcacggccgtccaccgcctcccccacctgctccagcgtcatggggacgtcctggctgaaggaaccggaaaagcgggcggtgacggagctctccttggacaggcgcagggcctcctcctccgagaccgcggccgcgaagtaccagcggtcggaggtgatgagcttgccggcggtgccggagggggccgtgacctgctgcccggccagggcatccaggtcggcgggggtcatggtcaggatggactgaggggtgagcaggctctcatagccgtcggccaaagaggagaacacccccgcggcaggagcggtgatgcggctggtgacgctgctggactgggtgcgcagggcgcggtactcctctatcagcgactgccgcagggcggagagctgggaggagtcaagcccctcaccataggtgtagctgcgcttgagcacctggcttttcagctccatcacgtcgtcgtccagctgacggtaggagccagaggcggaggcgaaccgcagggaggccagggactggaggatggattcgtccagccgggcggcggagacgacgtcgtcggtctggttcatggcgtaatccagcagctcgatctccatggccagctcctccatctgagcctggacgtccagcgcctggctgttctggtggaccagagccacagtctggccccggcccacttcctccccttctgcccgggtaatgtccaggatgcccgattgggcggggaggagctgttcctcccgcaccacccagccgtctgcctccaggctgtcattggcagtataggagtaggtgagggtagtggtgaagggatcggtaaagctgtcccaggcgtagacgcccagataggcggccagcatcaccgccagaaggacgatgaccagcgtgaccagactgttgccctgtttcatgtgaccggctctctttctcttttgcggatgggtgtggggatggggcgggagttactccagctcgccgggctggcagagggggacgggccgctccgggacgatagtggagatggcgtgcttgtaaatcacctgctgcttgccatcgctggtgaggaccacggtgaaggcgtcaaagccggtgacatagccccgcatctgaaacccgttcatcagaaagatggtgacggggcggcggtcccggcggacctgggtgaggaagatctcctgaagattgttggttttctgcatggtgagcactccttttttctttaaggcggagcagagctcggcccgagtgcctctatactaaaccaaattcttccaaatattttgtcgaagtccggcaggccgcttcaaaatcaggctccggtccccagaagagccatttggccccttcggtacggcggaaccaggtgagctggcgcttggcgtactgccgggagcggagcttgatctcctccgcggcggcgcagacatctccgccgccgcgcagcgcggcggccatctccttgtagccgatggcctgcatggcggtgcaccgcaccgggacaccggagtccaggagggcccggacctcctccgccaggcctgcggccatcatctcgtccacccgccggtcgatgcgcgcccacatgtcctcccggcgctgaaaggccagggagagggtgagggcatcgtaccggagcgggagggcccgggtctcccggttatgctgggagatggtctttccggtctgctgaaagacctccagggcccggacgatgcgcttgcggtcgttggggtggaggcgggcggcggcctccgggtcggcggcggccagctcccccagcatggcctccccccccagggcgtcaaagcgggcctccagccgggcgcggagaccgccgtcgggggagaagggggcgaaggtgcggccggagaggagggagtccaggtagagacccgtcccgccggccacgatggggagcttgccccgtgccaggatgtcgtccacgcagggggcggccagctccacgtaccgggccacggagaagtcctcctccggggcggctacgtccagcatgtggtgggggatgccccgcatctcctccggggtgggcttggcagtgccgatgtccatccggcggtagacctgcatggagtcggcggagaccacctcgccgccgtggcgcagggccagctctacggccaggcgggtcttgcccgaggcggtggggccggaaatgaccaggatctttgggggcatgggagactcctttcagcgggctcaggggccggtatagagaaagcctgcctggtccagcgcggcgcggacccggtgccaggcggcctcatctgggcagaggatggtgtgcaggtggacaccgccggtgagggcggacaggggccgtgccccgcttcgggacaccttttggaggaactgccccacgtcataccgggaggataggtggagctggccggtgagctggccgtagaccgggtgctccacgatcacgtccagcacggtgcagccgttatccaccatgagctccagctcccggcccatgtcctccggccggtggacacaggccagctggcgggtcagaccgggggtggggcgggggagcagatagccccggggggtggcggcgatgtccagcccgccggccctcagcagggcgatgtcccccacaatgatctgccggctgacagaaaaacgggccgccaggacggaggcggagaccggcccggccgcctgggagagatagtcggacagcgcggcccggcgctggactgcgtccatgggggaccctcctctcttgaagatctgggtgatatttaatcatagcacagatcggagcgggaagcaactgccgtctgcggcacgccgggcaccaaatctttccggggaccgcttttggcgcgtttgatggctgcatgcgccccttcgttccgctcccgcggcacagacaaagggggctgggtcggaatttctcttgaaggatcttaaatagatgtgttataatactattctgagcaactatagccgaagggcgggaaaggagcgggtggcctgtgaagtatgaaaaatggacggtggcccctcctgatccggctgccctggctgccctggaggaggcggggatctcacctctgctggcggcggtgctgtccgcccggggcgtacgtgtgccgcaggaggcccgggccctgctggagggtggggagacggccctggaggacccgctggctctgaaggatatggcacaggcggccggccgggtcaggctggctctggagcggggagagaccatcgcagtctacggggactacgatgtggatggcatcaccgccacctgcctgctgaccgatttcctccgacggaagggcggggcagtcatcccctatatcccagaccggctggaggagggctacggcctgaaccgggaggcggtgacggccctgaaggagcagggcgcctccctgatcgtcacggtggactgcggcattactgccctggaggagaccgcctgggcccggtccctggggatcgatgtggtcatcacggaccaccacgagtgcaagagcggcctgcccgccgcccaggcggtggtggacccccggcgcagcgactgccccagcgcctgcaagggcctggccggcgtgggggtggccctgaagctggccatggccatcaacggaccagaaggggacggagacgtgctggcggagtactgtgacctggccgccgtggggacggtggccgacgtgatgcctatgaccggggagaaccggaccatcgtccggctggggctggaggagctctcccacccccgccggctgggcctggccctgctgatccgggaggcggggctggaggagaaggccatcaccgccacctcgatcggctacaccctggcgccccggatcaacgcctccggccggatgggccgggcccagatggcggtggagctcctcctcaccagggaccgggagcggggggagcagctggcccaggagctgtgcgccctgaaccgggagcggcagaccattgagggcgagatcttccggcagtgtgtggatcggctggaccgggccccccagaagggggcggtgctgctggccgacccggagtggcaccagggcgtggtgggcatcgtggcctcccgcctgacggagcggtacggctgccctgcgtttatgatctgcctggaccacgggatggggaagggctcttgccgctcctggggcggcgtgaacctgtttgagcggctggcagagtgcagtgacctgctggagggcttcggcggccacgccctggccgccggcttcaccgtgcgggaggagaacatcccgcttctctcccgccgcctgcgggagggtttggagcgggccctgggggccggggcatccccagccgccctggaggccgacgcagaggtggaggcccgggagctcactgtggaggcggtggccgatctggaccggctggagccctgcggtactggcaacccccggcccgtcctggtgctgcggggggccctgatccagtccatgtcccaggtagggcggggccgccacctgaagctgcggctggagtccaaggggaccccgctggacgccattttcttttccgccgacggggccgagctggggctggcccccggcggccgggtggatgtggccttttatccccagatcaatgagtttcgaggcacccgctcggtgcagctccaggtggcggacctgcatccggcccccacccgggctcaggcggagcgggctgtctatgagaaataccgccggggggagggcctgaccccggcagaggcccggctgctgatgccttcccgggcggagtttgtggggctgtggcgctatcttcagcgccggtgcgccgggctgggccgggtggaggacaccgcctcccgcattgcccggggggcctcccgggccactggacagagggaggccgccgagcgggtcctgctgtgcctggaggtgctggcggaacgggggctgatcgacctggagaccggcccgcagggggtggcggtctccctgcggcaggtggagaggaaggtggacctggaggcctcccccatcctgggccgtctgcggcaggccatccgcggcggcagtgcggaggcgtagcgccgaggagagaaggcgctgcgcgctttaggcggcccccgctttactctaaacttttgcgaggtgatccgaatggaccctattctggaacgatatcaggcgctggaagacaaggtgagcgcctataccccgggactggacacccagcgcctgtaccgggcgtttacctatgcggacgcggagcacaaggggcagctgcgcaaggacggcaccccctatatcacccatcccctggcggtggcggagatcgtggccgacctggggctggacgcggactcggtgatcgcggccctgctccatgataccattgaggacaccaacgccacccacgaagaagtggccaagcagttcggcgagacggtggccgccctggtggaaggggtgaccaagctgtcccgggtgcagtacacctccaaggaagaggagcagatggagaacctgcggaagatgttcatggccatggcccaggacatccgggtgatcctcatcaagatctgtgaccggctgcacaacatgcgcaccatggaataccagtcccccgccaagcagcgggagaagtctctggagaccatggagatctacgcgcccatcgcccaccgcctaggcatgcagaagctgaagtgggagctggaggacctgtccctgcgctacctggacccggtaggctataaggagatcgaggacgagctggcggccaggtcctctgcccatgaggagttcctggccgccgtccagcagcgcatcacccagcggatgtgggaagagggcatccgctgcaaggtctacggccgggtgaagcacacctattccatctaccgcaagatgttcgcccagaacaagacactggatgagatttttgacctgtatgctttccgggtcatcgtggacgacatcccagagtgctacaatgtgctgggctgcatccacgacatgttcaagccggtgctgggccgattcaaggactatatcggcacccccaagcccaacatgtaccagtccctgcacaccaccgtcattggccgggagggggtccccttcgaggtgcagatccgcacctgggccatgcaccagacggcggaatacggcgtggccgcccactggaagtataagcaggggctggccaacaagcagctgggcacggagcacgacttcgagtgggtgcgcaagctgctggagagccagcaggacaccgacccggacgagttcgtccgcaccctgaaggtggatatgtttgccgacgaggtgttcgtcttcactcccaacggggacgtaaagagcctgcccgccggcgccacccccatcgacttcgcctactcggtccactccgcggtgggcaaccggatggtgggggccaaggtcaatggccggatggtcccctatgaccaccagctctccaacggcgacatcgtggaggtgcttacctccaagacggccaaggggcccagccgggactggctgaagatcgccaagagtaacgaggcccgcaacaagatccgtcagtggttcaaaaaagagaagcgggaggagaacatcgccaccggccgggcagcttttgagtcggagctgaagcacgtgggcctgaagctggaggctatcaccgctccggaggtgctgcccagcatcctgcgcaaggtgcgcttcggcaccctggacgagctgtacgcctccatcggttacggcggcaccaccgcggtgaaagcggtggcccgcatccgggacgagatgttgcgcctgggccgcctccaggcggagaaggcggcggccgcctccaagaccacggcggagagcgtcatcgttcccgccagcagccaggaggtcccggtgctgaaggggtccaacaagcactcggactctggcatcatcgtggagggactgggcaactgtctggtgaagttcgctaagtgctgcacccccgtgcccggcgacccggtggtgggcttcatcacccggggctacggggtgtccgtccaccggcaggactgtcccaacgccgaccccggcaagcgcaagccggaggaggccgcccgctgggtcaaggtctcctgggtggagggcagcctgcccagctaccagaccagtttggagctgtccgccaaggaccgggacggcctgaccctggatgtggccatggccctgtccaccgccaaggtgaaggtgtccgccctgtccgcccgctctatgcccgacggctacgccagcgtcagtgtggtgctggaggtcaaggaccgggaggagctctcttccgtcatcaacaagctgaataacatccagggtgtctaccaggtggtccgggccagcggaaaataatatagatggacaaagggggcaggatgtcatggtatgggagatcttagggatactgttcgcttggacctggccgatctgggcctttgtattcgtgttctgcttggcggccgccatctccagggccgttcaggaggcgggagacgggaagagccgggggagcggctggtatgcttttggagcggcgctggccctggcggtcatcctgggcgggctggtctccctgatcgtcatggcagtgtgacgatcatcaaaaaacgatcgaggtgaaatgcgatgagagcagtggtgacccgggtctcctccgcctccgtctccatcggcgggacggtggagggagccattgagcagggctttctggtcctgctgggggtgggccccggagatacggaggccgtgtgtgacaagctggcggagaagatctgcaacctgcgggtctttgaggatgagaacggcaggatgaacctgagcctggagcaggtgggaggtgccctgctggtggtgtcccagttcaccctgtatgccgatacctccagccgaagacctggattcaccggggcggccagacccgacctggcggtccccctgtacgagcgattcatggagcagtgccgccggcggggcttccaggtggagcacgggaccttcggcgcggacatgcaggtggcgtcggtgaacgacggaccagtgaccattctgttcgatacggacaaaaacggagcgggaagggcgtaaagcgcggcgcggtccgcgctttggctgtccccgccggactttgacccaaaagaggtgttctaacgatgaaagtaaagctgctgcgggtggggcccatcggcaccaactgctatattctggaggacgaccagacgaacctggccgccgtcatcgatcccggcgacgagccggagctgatccaggaggcgctggagaaggagggggtggaggtccggtatctcctccttacccacggccactatgaccacaccacggcggtgccagccctccaccgggtgtatccccaggcggatatctatatccaccaggctgacgccaacggggcgggcagtaccttgttccccctggccggcgaggtggacgatctgaagctctacgacgagggggatgtgatccgcctgggggaccacgagatccaggtgctccacacccccggccattcccccggctccgtcaccctgaaggtggaggacgtgcttttcaccggggacaccctgttcgccggctcctgcggccgcaccgacctgcgggggggcagctatgagcagatcatgcagtccctgaagcggctgggggagctgaagggggacttccacgtctgtcccggccacgaggccacctccaccctggagcgggagcggaggagcaaccccttcctgatggaggccatgcggagctgagggggcgcctgcccgaagatttttcccgtgaggaaggtggactatgaagctgtatctggatctggacaactatgactaccagccggagcgctataaatacgcggtggagcagatgatgctcaccctcttcccggaggagcggccggaatatcccccccgggagggccgtacactgaagggggagaccaacgccgcccgcttcaccctgcgccgcagccccgtgtggaccaccgtccgcgcccaggtgtaccggccccaggggatggggcaggctgcggtccgtgtggggagcggggagctggaccgtccgccggagcaggtgtaccacaccctccagcacgccctgaagatggcattttaccaggcgggcaccgccctgctggggggcgagccaccctggggcgccctcaccggcgtcaggccggtgaagctgcccacccgggccatgctggcgggggccacggaggcccaggcctgccgggagctggagcgggagtaccacgtctccccccgccgggcccggctggcggtggagtgcgcccgggccagtctggcggaggaccggcagctggaagagggacaggtgtccctgtatatcggcatccccttctgtcccacccggtgcgcctactgctcctttgtctccgccgacgtgggtcgggccctgaagctggtggacccctacgtggaggcgctgctggaggaggtccgccgcacgggacaggtgctggaacaggccgggctgcgggtccgcaccctgtatgtggggggcgggactcccaccaccctctccgcatcccagctggaccgcctgctggcggcggcggaggcccatcttcccctggcgggctgccgggagatgacggtggaggcggggcggccggacaccattacccgggaaaagctggaggtgctgcgggaacacgggatcgagcgcatctccatcaatccccagaccatgtcggaccaggtgctccaggccatcggccgccgccacaccgcccgggacatccgggaggcgttctgcaccgcccgggaggtgggcttcgcctgcatcaacatggacttgatcgccggcctgccccaggacagcgtggagggcttccgggactctctggaggaggtgctggccctgaggcctgaaaacatcaccgtccacaccctggccatgaaaaaggggtccaggctgatggaggaggggggcgcgcttccttccagtgaggagacgggccgaatggtgaacctcagcctggaggccctggagggggcaggctaccggccctattacctctaccggcagaagtacatgtcaggcgggctggaaaatgtgagctggtgtttaccgggaacggaaaaccactataatatcatcatgatggaggaactgcagagcgtcctgtccctaggggctggcggggtcaccaagctggtggaccggagttcggggcggatcgtccgcctcaccaaccccaagtatccccacgactatttggcgatgtccgccaaagttctggagcagaaggacgagatcctgcgcttctaccgggaggtttgaaccaatggcctatcaacttcaggagatcaaccgaaggatcaagaccgatgtcaccgagtttctggaggagtgcgaccaggcgtatgcccagcgggtgtccctggccgcagaccgcatcctgagcaatctggacaagagccccgtggtgctgctctccgggccctcgggctcgggcaagaccaccaccgccatgaagatcgcggaggagctccagcgccggggtgtcaatacccacgcggtggctatggacaactacttcaagagcctgaaccgcaagaccgcgccccgcacccccgagggagacatcgactacgaatctccccagtgcctggatatggagctgctggaccagcacttcgccgccctgagccggggggaggagatcatcatccccaaatttgagtttgcccgccagatgcgcaacgacgcccggggcaccccactgaagctggggaagaatgagatcgccatctttgagggcatccatgccctgaacgacgacatcgcaggtcctcacccggaggccgccaagctgtatatctccgcccgttccaatgtgaacgacggggcggccctccgattcaaggggacctggatgcggctgacccggcgggcggtgcgggattacagcttccgcggcacaggtgtggctgacacactggagatgtgggccaacgtgcgccggggggagaagctgtatatctccccctataaaaaccgggcggacatcatcttcgactcctccctgccctatgaggtgtcggtgatgaagaattttgccctgcctctgctccaggcggtgccggaggagaacacacggcgtggcgagctgctggagctgatcgaggcgttccagtggttcgagcccatcgacccggagctggtgccggtggactctctgctgagggagtttatcggcggcggcagctataagtaccattgaacgaagaagagagagctggggcggtagcccgcgggctgtgtggcccggggcacgccgtgccagaaaaatgtggagtgatgtttgatgtctgatcctcttgtctatgactcaaggagcgtgcggttcaaatccccctatggagcggtcccttccgggacccaggtgacgttcaccctccgccccctgcggtcggagggctactcccgggggaagctcaccgcccggctggagcagcgggacaatcagatcatcacggtggagctgccctggacagacaccgagctggggcgggatgccttctccggcgtcctggacactggggactatgtgggactggtgtggtacacctttcagctggagaccatcaccggtcggcgctggaacataaaggaggagtaccagcttaccgtctacgacgggagcgagatcgtgccccgctggttcggggagggggtgagctaccagatcttccccgaccgcttccgccgcacccgggtgcctgaccccgcggggctggtaggggggcgcactgtccaccagagctggcaggaggagccggagtaccgacccgacgccaacggggagatccgcaaccgggacttcttcgggggcgacctgaggggcgtgatagaggagctggactacctccagtccctgggggtagagacgctgtacttcaaccccatcttcgaagcggcggagaaccaccgctacggcaccgctgattacagccgggtggacccaatgctggggaccaacgaggacttctccgagctgtgccggcaggcccaccgccgggggatgcgggtgatgctggacggggtgttcaaccacaccggctttgtcagccgctactttaacggggacggctattacccggagccaggggcggtgcagagcgagagctccccctaccggccctggttccagttccggcactggcctgaccagtacgagagctggtgggggatctataccctgcctgctgtggaggagagctgccccggctaccgggagttcatttttggggatgagaactcggtggtccgccgctggctgcgggcgggggcggacggctggcgcctggatgtggctgatgagctgcccgatgactttgtggccgggatccacaccgccgcccgggcggagaagcccggggccctgctcatcggcgaggtgtgggaggacggtaccaccaagatcgcctatggggtccggagaaagcacatcctgggccgccactgcgacgggctgatgaactaccccttccgaaatgccgccctcaactttctgcggggcggggacggggccaagttcgtttccgccatggaggccctgagggagaactacccctcttttgccttttactctgccatgaactctctgggcacccacgacaccccccgcatcatcactctgctgggggtgggcagcgagtgcagggaccagagcaaggactggcgggcctgcttccgtatgagtatggagcagtaccagcggggaaaggagctgctgaaagtgggggcggtactcctttacgcctttcccggttcccccacagtctattacggcgatgaggcgggactggagggctttgaggaccccttcaatcggagaccctacccctggggccgggaggatcgggagctggtgggctggttcgccgccctgggcaggctgcggaaggaatgccccgccctgcggcggggggatatccggtatctggccgggacgggccatctgctggctttcctccggagcacggagggggagcgcctgctcaccgcgctgaacgccggggacgagccggcggtcctggctctgccctggacggaggagccggagcgcctgctgggcgctggggagtgggccttgaccggggagggcccggtgctgatgctgcccccccgcagcggcgggatctggcgcgtgggggaggcggagccggcccagatgtagaagtgccgccagtgggacgaaaaagttcaaacgcccccttgcatttccctgaaaaacatgctatacttttccctacgtccgggcatagacccgctgaacaaacgatttgcccgctctgggctttgaaaggaacgagaaatgccatgaaaactgctgttaccgtgatccaggtgctgtgcggactgtttctgatcgccgtggtcctgctgcagtccggcaagagcgcgggcctgtctggtgccatcgccggcggcgcggataccttcctgtccaagaacaaggccaagactgtggacgccaagctggccaagtggaccaagtgggtggccatcgcctttatgctgctcaccctgtccctgagcctgatcccctgactgtaaagagccccgcctgttttgaaaacaaaacaggcggggcttttttataagatagactggtcggatctatgagccggtgctgtgatgccgtgcccggcgtacttccaacacccggctgagcagggcgcccagcaggagcacgttgccgcagaagtagagccacaccagaaggatgatgagggaggccagagagccgtacagcatggagtagcgggaggacaggccgatgaaccaagagaacagaagagagcctgccaccagtgagacggcggtgaagagggaactgagcagcagcttccggctgctgcggaagcgccggggagtgcccaggcggtagatggccagcaccagcagcaggacgaagcagaacagcagcagatagcggatccagagccagagactggacagggcggagagggggatcaggcgcagcaggggatggggcagatgggtctccagcagatggaagaaccagtcaccggtgaagatgaccaccacagacaggtaaatggtgagcaggaacagcagggagaggatcacgctgagggcgatccggcgcagcccgccggggtgttccaggccatacagcttatccatggccagcagcagggcgcggagccctgcggaggcggacagggcgatggccaccagggcggcggccacgatggcgggggactggttcagggaggcataggccagatagtcctgcatgacagccagggcctggtcgggcaggacctggtccagtcccgacaggagctgctccagactcaggtggaacagtccgatgaagtagttcacgcacataagcagggggaacagggtcaggatcagaaaataggacagggcggcggccgcctgcgccacgccgcagcggccgtaggtgctgaacgcctccagtgtgaaggagatgggcggaaaggacagcagacgcttcaagaggcacctcctctcgtgtccaacggtgtcgaataagggaaaattgagaaaagccgcctgcaaagcagacggcttttatggtgcaaacacagggcaggactcaggccagcttgttcagcttcagagtcaggctgctcttcttgttcgcggcattgttcttgtgcagcagacccttggcagcagccttgtcgaccgccttgacagccaccttgtaagcgacatcggcctcgctgcggttgccttccgccaccgcggcttcaaacttcttgatgtcggtcttcagcgcggacttagcggccttgttctgcatggccttggcctgattgaccagaacacgctttttggcagacttaatattcggcaaaccaaacacctcctccgatcgaatcgtaaaatggtgcacagaaactctgtgcagatatgtattgtaccattggatcttcaaaaaatcaactgtttttttaaatttttcccgcttttttggatagaatccctggcgccgcaaaaaatagggcagaagcggcagctattccactatatcttgcggagggaggagcgggacatgcggaacagaaggacggacctggctctggaggccagggagctgtggcaggagtcggcggaggagcgtacccagctggagggggtggaggcccgggaggagatgagggagggcatccccgtgacccgggtcagcatcctggacaggcggggggaggaggccctggggaagcctgtggggacttatgtgaccctgaccctggacgggctggccagacgggaagagaatgctttcggccgggcggcccgggcggtagcggcagagctgggggagctgctgggcttccttcatccagaggccccggtgctggtggtggggctgggcaaccgagccatcaccccggacgctgtgggccccaaggtccacgagtacaccctggtgacccggcacctggtacggcaggtgccggagcacttcggggacctgagaccagtggcatccctgtctgccggcgtgctggggaccaccggtatggagagcggggaactggtccgggcagtgtcggagcggctgcggcccgcctgcgtgatcgcggtggacgcgctggcctcccggtccctaaaacgggtgtgccgcacggtgcagctggcggataccggcatcgccccgggctctggggtgggcaaccaccgggcggcgctggaccgggcttccctgggggtgccggtgattgcggtgggggtgcccaccgtggtggacggggccaccctggccgccgatctgctgggtacggaggagctgcctcccctgggggaggggagggacttgatggtcacgcccaaggatatcgacagccaggtggcggacctgtccaaggtgatcgggtacggcattgacctggctttacagccgagcctcaccctggaagacctggatctgctgttgagctgagggaggagccgctgccaaatgggaagaaagggaggtcccgacagaggggcggctcccagagccgcccttcaggccttccccccaccggggggaaggtggcgcggcgtatgccgcgacggatgaggggtctttcttttcccgtctcagtcatgatttgtcagagggattccaccctgcggggcggaatcccttttgtggcatcctgagacggaggcgggcctgtactccttatttctaatggtttcttcccgaaacgcccctgccgtggaccttccccacataggaccaaaacacccccagccaggaccggaacagagccggtcctggctgggggctttttaagaagaaatttccccggggatgaccacagtctcccggtagtactgggcctggaggaactgctggtagaaccgggcctcctccgggacgagagcatctgtgaggatgccgccgctcaggaagagcccccgagtatggatcaagggggagatggcctccagctggcgggacagctccatgaagccggggccctcccagccgcacagctcaaataccttgttcatcagaaagcagggagagaagtcgctgccctccccggtgaagctgctgcccagcgcctcacgggcggcggagttggcccagataaggtagggggtggagtagtactcccggaagccggagagctgagacaggtcgaagccggccccgatctcggtgtaccccgtattgccgttgcccatccagggcttgtggtccccaaaaaggaccagcacaaagggctcgggccgggcattcagctcccgggtcagccgctccatggcggccagggtgctggagacattggacatatagttgttgagcatgttgcaggtctccgccgaccagccggtgtccccaggggacaggaagacctcctgggcggaggcggtctcataggggccgtggttctgatagctgacggagaaggagaaccaggggcccggttcccgcagcccgtccagaataccgtccaccagcgcctcgtcggagcgcatcacggcatccaccgggtccaccagcgccccgtagtagttctcggtgaaccagctctcctcaaagcccaggtactcgttgacattctggcggttgtagaaccagctgtagccggggtggtgaaaaagggtgtgatagccctgctcccggaaataccagacataggagtcagtgggcttgcggaagtcctcgtgctgagtgtagccggtaagaaagccccactcgctgtccaccgtgccgcccgcgaagatattggtcagcaggtcgccggagacggactgctcctcaaggtcgtggagcggggcatagaccgcctggacggcgggctgctccgccagggcggggaagtcggtcaggtcacagaaggcctccagcatcaccccgaccacgttgacccggcggtccgccgggatgtcctggtctggataccgggcgagcagggaggcggcctcctccgggtcgtagtcctccggcggggtggggaacatgtcctgcacgctgtacagaaaggggtagaggcagccccgggagacaaagacctccacatccgaccagggggtgatatgggtgtcgttggcggtgcggtcatacaggctctggtcgcagtagagggccgcataggacaccgccagcagggcggcggaggagcacaggcagaaccagcgaagggggccccggcctatcccgcggggcagaaggaaaacggagaacaggagacccaggatcaggcaggccgcacacagccacaccagccaggtcaggtccaactgatagtgtcccacgatcccccccgcctcagtgaccaggcgcaggtcggcggccagcagagggtcccctcgcaggcggatcttgaagtaattcaccagggccagtcccacacaggggaggaagctgcccagaaaagctgcccaggcccggcgggtaagaaaatagaagaaccagatgagcaggatgggcggcaggacattgaggagcaggagcatgggctccaacaggaaataggacaggaacaggtccgtgctgttcagtttgagataggcggtggcggcgagcatcagcgtcaggacgccgacacagaagcccagccctgtcagggcaaatgccagccagacgtggtgccagcggagcagtttgggctgggtccctgggggagccagcagaacagcgcgcagccgagtcattcagatcacctcatgcgggatgggggacgcggccccataatggagcagtatatcacagcggaccggaaaaagaaacagcggatttcccaggcgatccagcccgatgcccgggcagccgccccctgcgtggaatgcggggcccaagagacgggaaggggcggcggctccaagcatcccgtggggggcccagacccgccccgcaaactcccgtcttgcctctgctgccgttccagtggtataatgtttcccgacctatcacagatacgggactatgtcccggggaaagggtgtcgcttatgggtctcagaggtatttttgatccggaaaacggctttttccgcacactctcccgcatggtggacgtggtggggctcagccttttatgggtggcgctctccctccctctggtcaccttcggcccggcctgtgccgccctgtaccacacggtgacccactgtgtggcctgccagggggacagcacctacctcaccttcttccgctccttccgggccaatctccgggtgggcatccccgccggcctgctggtcctggccgcgggcgccctgctcctccaggggtaccagatcatggtcctggcggccaattccgtgggcggcggcgccctggccatgtacggctgctactgcgcggccctcatcgtccccgccggcgtgtcctgctgggccttccctctgctgtcccgcttccagatggggctgggacacctgctggtcacctcctttcaggtgaccctgcgccacctgccccagaccctgctcctgatcctgctcctgttcgtcacggtgtggaccacagccggcttcttcccgctggccgtcttcacccctgctctcaacgcactgcttgcctccctgcctgcggagcgtgtcatccgccggtatctcccggaggaggagaatgggggagaggaggagctgtgacccctcttcccgcctctcatccgacggcaaacgggcggggacaccattcccggtgtccccgcccgcttttttcactgcccgagcgcccccgtggccggaggggagaggaccgctcccaccctggccgccagctgggcatggcccgcctgggtcaggtgcatgtggtccactcgattcagctcacagccctccccgtccaggaaacgcgcgcccagcctggctgccagccggcggtagtgctccgccagctgacgggacttctccgcgcatccccggcccatggcagcggccacgggggagtgctccacctccggacgaatggcgggaggcgccacgatcagcagatcgggtcccccgggtccccagcagtcctctgacatggcctgccgggccagccgctccatcccacgggcgatctcctccgccgagaggccgaagcgctccttggtgtcgttggtacccagcatcaggatcagcagggagaccggggcatggctcagcaggcagggacgcagataggaaatggcgtccagccctggctccaggggatcggggaataccgtggtccgcccgcacagtccctcctcgatcaccagatattcctctcccagggcgcgctggagcagacagggccagcgttccgcctcgctgaaccggcctccgcagagggtttccccctcctgagctccacagtagccgtgagtattggagtcgcccagacagataacatggcgcttcatgatatttcagtcctccgttttgtttatttttttgtacctataacctatcagttttcctgaaattgtcaaggttttgtttcaatttgggtctaactccacgttaaaaattttcttttttcgcaatttgtgaaaattttttcattccgtcttgacaagctcggtgatttcctataaaattttcttaacccaatcggcaattatttgtgaaaaatgattcacaaggaggacaatgaaatgaaattcaaaaaagtagcagctcttgtcttggcttccgccatgacgctgggcctggctgcctgcggcaacggcaacagctccacccccagtcagtccagcggcggtgcctcttcgtcgggcaccacctccagcagcgccactgagatcagcctgtggtccttcaacatcggcggcttcaccgaggcatctaactgggattccctgatcgccgccttcaacgaggccaaccccgacatcaaggtcaccgtcacccccatcaactatcaggacggcgaccagaagctcacctccgccatcacctccggcagcggccccgacatcatctttgagggccccgagcgcatcgtgggcaactacgcccgtgagggcctgatggtggacctgggcgacgtgtggggcgatgcctccgcggatattggcgagaatatttccagcgtctgccagctggacgggacctactacatgtaccccctgagcgcggccgcccactgcatggccatcaactacgaggtctttgaggctgccggcgccctgcagtacatcgatgaggagacccgcacctggaccaccgagggcttcgaggccgccatggctgccatcaagactgccatcgacaacggcaccgtcaccgtggccacccccggcatcgtctactgcggcgcccagggcggtgaccagggtacccgcgccctggtgaacaacctgtactccgactactatgtcaccgaggacggcacttcctacaatgccaacagcgccaacaatgtgaaggctctgaccctgctgcagaacatggtgaacgccggctctctgtccgccaacgccagctacgccgctgccgatgagcttcaggctttcgccaaccagacctgtgcggtcagcttctgctggaacttctccaactacagccagtacgcggaccagacccagttcacccccttcgccatggcgttcccctctgacgatggcacccccgagctggagatggccggcccctacggcttcggtatcttcgacaacaaggaccaggctaagatcgacgccgccaagaagttcatcgactttgtctgcaacgatgccaccgccggtgtggaggctgtgaagacctccagcttcttccccgtgcactccgactggggcgatgtctacgccgacgctgaggatgccgacctgcgcgctcccttcgccctgatgagcaactatctgggccgctactacaacctgaccggcggctggaccgagcagcgcgccctgtggtggcccatgctcgctgagatcctgaccaccggcgctgacgttcagatcgctgccgacaacttcgtgtctcaggcgaacgccaacatcggctgacctcctgcggaagcacgtatcctgttccatgcgatcctgtgcccgctccctgaatgagagggggcgggcactgtgtatcttccgtcctccccgggggagggcaggcaaattcttgtcaaagagggggaaatcttatggctcagaacactcctgctccggctgccggacagaagcctaaaaaagtcaagaaaagcgctacctccggtatgagccgcgcgctggtgcggcgggagaccacctcggcctacctgttcctgctgcccagcctgatcttctttgtgaccttcgtggtcgtccccatgttcatctgtgtgtattacagctttaccgactacggactgggcggcgtcaagggcttcgccggcctgtccaactacatcaagctgttccaggaccccatcttccaccgcggctttctgaacacggtgctcatggtggtggtggcggtgcccagcgtcaccgcattctccctgtgggtgagctccgccatctacaagatgcactccattccccgctccttcttccgatgtgtgttctacctgccggtggtcaccggctcggtggccatcaccgtggtgtggaagtggatcctggacccctacaacggcatcctcaatcaggtggccggcacctccagctttgactggctgggcaatccaaaaaccgccatctggtttatcatcctgatcctgttcaccacctccatcggtcagcccatcgtgctgtatgtggcggctctgggcaatgtggacaactccattatcgaggcagccgaggtggacggcgccaccaagtttcaggtgttctggaagatcaaatggccctccatcatgcccactaccctgtatgtgctggtcatcaccaccatcaacaccttccagtgcttcgcgctgatccagctgctgaccaagggcggcccgctgaactccaccatgaccatcatgtaccaggtctacgacaccgcgtaccggctcaacgacctgggctatgcctgtgccatcggcgtggttctggccctcatcatcgccattttctccgccatccagttcaaagtggcgaagactgacaattaaggaggggcgagaacatgaaaaaaaccactgatctgagcggcacctccaaggggtataaggttttctccgtggccatcctggtggtcatggtgatcttcttcctgttccctctgtactggatcgtcaccggctccttcaagaacaagctggagatcacggcccggacgcccatctggttccccatcgaacccacggtggaaaactacgcccggctgtttgacaaccccgccttcctgtggctgttcaacatcatcttcatttcggcggcggctatgatcctgacctgtctcaccgcctccctggcgggctacgccctgggcaagaagcgcttcatcggccggggcgtcctgttcaccatcatcatctgcgccatggccctgcccaagcaggtcatcgtcatccctctggcccaggagatgaccaacttcttccatctgaacgataccctttgggccgtcatcctgcccacggtgggctggcccttcggcgtattcctgatgaagcagttctccgagaccatcccgacagagatcctggaggcggcccgggtggacggcgcgggtgagctgcgcaccttcatcaccgtggtcttccctatgatcaagcccggtatcggcgcgctggcaatcttcaccttcgtcaacacctggaacgactacttcctccagctggtcatgctcaccagcaaggagagctggaccctgccgctggccatcgccaaccttcagggcgagatgtccactgacttcggcctgatcatggcgggcgcggcgctggcctccattcccatcatcatcgtattcgtggccttccagaagtacttcacccagggtatcgccatgggtgcggtcaagggctgatcctaaaaaactttaaatctttgcaaattatattggagtgatcgatttatgcgcgatttcagcaaatatcagggcgtcatcccggcattctacgcatgctatgacgatttgggcgccgtcagcgccaccaaggtgcgggagctcacccgctatctgatcggcaagggcgtgaagggcctgtatgtgggcggctcctccggcgagtgcatctaccagagcgtggaggagcgcaagctggtcctggagaatgtgatggccgaggccagaggcaaggtcaccatcatcgcccacgtggcctgcaacaacacctctgacagccaggccctggccgcccacgcggagagcctgggggtggacgctatcgccgccattccacccatttacttccacctgcctgactacgctatcgccaagtactggaacgacatctccgccgccgccccgaacacggatttcgtcatctacaacatcccccagctggccggtgtggccctgaacggctccctgctcaaggagatgctgaagaatccccgggtcatcggcgtaaagaactcctccatgcctgtccaggacattcagatgtggaaggacgagggctgcatcgtattcaacggccccgatgagcagttcctgtccggcctggcggcgggcgccatcggcggcatcggcggcacctatgccgtcatgcccgagctgtatctgaagatctatgagctgtacggcaagggtgagatggagaccgcccgccagatccagaacgaggcctgccgcatcatttacaagatgtgtaccgccaagggcaacctgtacgcggtccagaaggccatcatccgtctccagggcggccccgacgcgggcagcgtccgcctgcccatgccccctctggccgacggagacgcatccatcgtgcgggaagcggcagggatgatctcggctgccatcgggaagtactgctgatctaacgagaccagggccgtgggactactccattcttcatagtcctcggacccataaaaaaggaggaagaaaagaccgccggccggcggtgcggcagtgtggagacctgtcgtaagccccgggatggacagcccgcccgggggaggggcctgctgcggaggcagaggtctcacggccagaagccatgtcaactgtcagtctgaagaacatctacaagatctatgacaactcggtcaccgcagtgagcgacttcaacctggagatcgcggacaaggagttcatcgtgctggtgggcccctccggctgcggcaagtccaccaccctgcggatggtggcgggcctggaggagatcagcaagggagagctgtacatcgacggcaagctggtcaacgacgtggagcccaaagaccgggacatcgcgatggtgttccagagctacgcactgtatccccacatgacggtgcgggagaacatggaattccccctgaagctgaagaaagtgcccaaggaggagatccagcagcgggtggaccaggcggcggagatcctgggcatcacccagtatctggaccggaagcccaaggcgctgtccggcggccagcggcagcgtgtggccatcgggcgagccattgtccgggagcccaaggtgctgctgatggatgagcccctgtccaacctggacgccaagctgcgcaaccagatgcgtgcggagatcatcaagctgcggcagcggatcaacaccaccttcgtgtacgtgacccacgaccagacagaggccatgaccctgggcgaccggatcgtgatcatgaaggacggctttgtgcagcagatcggcaccccccaggaggtctttgagaagcccatcaacatcttcgtggccggcttcatcggtacgccccagatgaacttcttcaacgcccgcctggagaagaagggcggcgactactcagtggagtatgccggggcgagcttcccgctggacggggagatgagcgccaagctggccgggaagggacagcagagcgccgacgtgatcctgggcgtgcgtccggagcacatcgcggtgcagaaggacccctccgcctccgccatcgaggcatccatcgaggtgtccgagctgatgggcagcgagctgtacctccacgccaccgtggagggcggccaggaggtggtcatccgcacccccaccgtagaactgccggcggagtaccggggcggcgtgccctatggcaccaagctccgcttcaccttctcccccagcctcatccatctcttcgaccccgaatctgagaagagcctgctcgtctgaatcgaggaacagaagtaggaagacacggataagcacccggtgcggcccccgtccgatcatgcggacggggaccgcgcctttttgcagagggccccaacacccgcccacctccggacgggaccgtgcccgttccagcctccctgttccggcgctgacgagccggagcagggaggctttgcgcccgggcggacatgtttggcgggcctttgtccggatataccatattttcccatagttttcggtatttttaacaaagtcatagggcggcctgcgtgctctccccggcagccccggcggccagtctggattttgatgcagctcatccgtcttttttgcattataatttttacgctcctttgtttttaatggatttggcggtaaaaatccgtcattttcgttaaaatatgaattatttattttcccatcttgcgtatcaatttttaaaggactataatagcatcacttcgctaactcaataaagtacctggtgccagagaaaacaaatttctaggagtggtcaacaatgtcctttcagaacgcttaccttaattccgtgatggatgatctgcgggcccgctacgcccacgagcccgagtacctccaggctgtggaggaatttctggagcccctttcccctgtgatcgattccgacccccgctatgagcagcagaacatcgtgggccgcatggccgagccggagcgcctgatctgcttcccggtgtcctgggtggacgatcagggcaagacccgcctgaatcacggtttccgggtgcagcacagctccgccctgggcccctataagggggggctgcgattccatccctctgtcaaccagtctgtcatgaaattcctggcctttgagcagacttttaaggactgtctgaccaccctccccatgggcggcggcaagggcgggtccgacttcgacccaaagggtaagtccgacggcgaggtcatgcggttctgccaggcctttatgaatgagctctaccgccacatcggtgagaacaccgacgtccctgcgggtgacatcggtgtgggctgccgggagatcggctacctcttcggacagtacaagaagctgaagaaccagtggaccggcgccatcaccggaaagagtctggcctccggcggctccctcacccgcaccgaggccaccggcttcggcctgtgctacttcggcgccgcctatctggccgaccacggccagtccttccaggggaagaaggtcatcatctccggctcgggcaatgtggccacctacgccaatcagaagtgcaccgagatgggagccaccgtggtggccatgagcgactccaacggctatgtggtggacgagaacggcatcgacttccgcatcatccagcagatcaaggagcagaagcgggagcgcatcagcacctatcccaactatgtccccactgccaaatacgtggagggctgtgccggcatctggtccgtcccctgcgacatcgccatgccctgcgccacccagaacgagatcgacaccgactccgccaaactgctggtgtccaacggctgtaaggccgtctttgagggctccaacatgccctgtactcccgaggccatccaggccatcaaagcctccggcctcctctactccccctccaaggcttccaacgccggcggcgtggctgtctccggtctggagatgagccagaacagcgagcgcctgtactggacctttgaggcggtggacgccaagctgaaggagatcatggagaacatctaccgccagtgcgccgacaccgcagctaagtacggccaggagggcgacatccaggccggcgccaatatcgtcagcttcctgaaggtggccgacgccatgctgtggcagggcgtgtattgaccgctccgtctgagctcctatcagaatgcgtccccgggacagaaactgtcccggggacgcatcagcttgtggaaaaagcctggcagagttcgcgcccgcagatgcgaaccaagttctgagctgtttttcccggcgacatgtgcgtcgggaaaaacactgctcaggctgcaggtgcaggcatactgtcgaaaaaacggccagccgaaggactcggagggaaagatactgtgaaagaaaaccttcaaggttgtctttcacatgcaatcaaaccacttttcagaacgttaaaacgttctgaaaagtgctctcagctcgtcgaaaatgctttgtcgacaagctgagggtttgcccgcctgcggcggacagaccctgcgcgcagcactgctgctttctcgaaaaagtgacttttccacttttcgacagtttcacgcgcccccgggacagtttctgtcccgggggcgcgttgatatgccggggtgtgggcccgatgccagtccccctttatttcagaccaggcggcatgatccgcagggcgtaggtcatgctctggcaggggatctccaggtagtcgcagaccttccagttgaggtacacctggccgtcccgctccacagtggggccgaaggtcatctcctctgctccatccaccaccagctcctcagtccctacggtgagcaccgcggtgtggccccggtaggtgatggtcaccgtcccggcctcacggtcccaatgacagccggctcccagccggctgcatagctccgccgccggcacctggtcgtcagcgctccagccggggtagtagaggacgaagggccgcaggctctcgtccagctccgccgggacgggcccgctgctgtccaccgggtactccaggtcccccaggatcaccgactccacctggtccagatccaccacccggtcaaagaagccgatggtggtctcggtgatggtgcgctggccctccggggcatcgtcatactccggacgggtaccccacccggccttcaggtcgccgggggtgtaaatggtgccgtccttcagcttcaggaagaactccccctggaggaaggtgtcccaggactcctcccactccccataagagtagaccagcttgtagctcagggggccgaactccagcaggtggacggtggcgctccggtcccactccggattgaggaggatcttgcgctccggctccaccgtcacggcgcccatggagcccacctccggcagacggatggcatacttcggtcccatgcagtccaccccgatccacagggtgtccagtccctcctccatctcgttggggtcgaattccacccggagctgggtggtcacgctccggtcggtgcgcaggctgatgtcttcccaatagctgtagctgtgttcaccctccagtttgggggaggcgttgcagtaccgccaggacagctgttcccccgcgtagtcggcgctggccagccatacgtctccgggatcaaaggtggactcaggggcatcatagcgctcccatgggctcatctgggccccctccatcagccaggccgccccctcgtcggtgagggcctccagggtcacctgggctaccaggccgtactggtccaccacggcgctgtccagggtcaggcggaatttcccgtccgacacgctctcgcccccctggatatagggctccaccacgctcaggtcgcccttgaaataccgctccaaaaatccgctgttcactgccagggcggtgcccatcagcagtgctgccgccagggccgctacccccgcagcacgtatcctgtgcttcatcggtctgctcctttccgtctgcccctccgccagcacccgctccatcagctcgggcgcaggacggatctgctccatcatctgcttgtattctcttcgatccatgctatccctcctccagcagcacccgcagcctgtctctgccccgcatcagctgggaccgcaccgtggccgggctccggtccagcagccgggcgatctcctccgtggtcatgtcctcgtagtagtagaggtggagcaccgtgcggtacttgtccggcaggcggcgcagctcctcccagagcgcctctccctccggggagggggcctccagcgtctcactgaggggctccgtccgccgccgccagggcgccgcatgaagctttttggcgcagttgatagtgacccgcagcagccaggccttccggtgctcctccgaggtgaactgggggtcgctgcggaggtagcggagaaagacctcctggtacacatcctcagcgtctgcggtgttccccgtccgggcaaaggcaaggcgatagaccatgtcagagtagcggcggaccgtctcctccgcctggctcgtccggtccatgtcatccccctcctttcacctcaaacaccccacagcggggcaaaatgttgcagggatcaaaaaatttttgcgcggcccctgaaccggacctgcgcaggggcacacagtgggtgtctgcctcatagaagcgggacgggagaagaaagacccctcatccgtcacggcttcaccgtgccacctccccccagaggggggaaggctttgggggcggtccgcacctttcctcttttgtgatctcctcatttatggtatatatatatcaggaaaaatggaagggccggcggccgggccccatctgtaagaaacttgtaagacttcccccagcttttttgtaagaaatctctgctatcctgttcccaggcaaaccgagagaggagctgcgctatggacacaaaggagaccgtcctggtggtggatgacgaccgggagatcgtgggggccatcgccctggccctggaaaaggagggctaccgggtgctgcgtgcctatgacggcatggaggccctggaccacgccctggacccggagctgcggctgatcctgatggatgtgatgatgccccgcctggacggcctctccgccgtcctccgcatccgggaacggcgcaacctgcccatcattgtcctgtccgccaagagcgaggagagcgacaaggtgctgggactgtccatgggggcggatgactatgtgaccaagcccttctccacccaggagctggtggcccgggtgcgcagccagctgcggcggtacacccggcttggggatgtgaacgcctccgccagagaccggcgcatcgtcagcggccggctgtcctacgacccggacagccgggtcctgacggcggacggggacgaggtgaagctcaccgcaacggagctgggcatcctggacctgctgatgtgcaacttgggccgggtctttcctgcggaggagatctaccgccgggtctggggggaggaggcctacgcctcggagaacacagtgatggtgcacatccgccggatcagggagaagatcgagctcaaccctcgggagccggactatttgaaggtggtgtggggaattggttataaaatggaaaaacatccttaacagaggcaacaagacagacagggccccggcaccggcggcgtgcccggcggggggccgcctgcgggcggcggcggggctgacggctttcctgctggggatcagcctcctgctggccggcggattgggccagtacggctggtggtccacggagctgggcgcccggtgggccagggacagcctggaggaggactggcaggacaccgccgccttccgaactatcatctgcaactggctggacgcctgtctcaccgcggggacctgggagtacacctccggaggcgactacgggaaggagctcctggatggcctggagggggacaagaacctgctctacgccgtggcgcggcggggcagtgtcctgtacaccaacacctcggacggcggcttcctctcctccggccagccgccggaggggtaccgcttcgcgctgcgctgtgaggacggaatggtgtccattacccaggacggccgggaactggatgtatatggggacggctggtacaccgaggacgacctgtggttcgtcccaggctatgagaacttccccatggatgcggatgccagaaacatccaggtctatctggccgcggcgtcagatccaaagcctatggtctacgggaattatctgggctccggcgcggatatctgcacctcccagctctatgacctggtccagaacctggcgcagtaccgccgggagctgctgacagagtgggggatgctggggggcggtgcgctgctgctggccctggctctggtcctgcgccgggacaaggccagggcggaccgcttcctggcccgggggaccggccggatctggttcgaggtcaaggtgctcctggcccttctggcgctgctcctcctcccctggggggagttgagcagttggtcctccgaaacacccgtcgcgtcctatacagcggcctcttccaccgccagcagcggctccgcacagtgggacacgggggccgtcgccctctattcttacagcggggatgtggttcagtcccaggcagagacccatgtgtatggaacgggggaagggccggacgtgctcttcgatttccttcaggcgctgggcacccgtcccgccgccgctgttctggccttcctggctctgtacctgctggtattcaacgacctgcggtacaacaggcaggcatggcggcacggagtgctggggatgctggccgcccgggagctggagctccctgtccagaagcggctcagccgctccgccggcctggtctccctgtcctgtctgctgctgaactgcgtcacagccggtctgctgatctggtgctccagctggtcctggggctccgtccggctggagacggcctggctcctctgtctgccgccccttctgctcgctgctgtgacagcggcattcctgttccgccagcgccggctgtggggggatctgggggcgctcaccggtcagatcgccgccgtccgggcgggggagctggcccgccccctggaactgccccgggaccacgacctgtcccaggcggcggatgacctgaaccacatccagcaggggctccaggccgccatggaggagcgcacccgcagcgagcggatgaaggtggagctggtcaccaatgtgtcccatgacctgaagacccccctcacctctattatcagttatgccgagctgctggagcaggaacatctggagccccctgccggggagtatgtgaccatcctctcccaaaaggcccagcggctgaaggggatggtgcaggatgtgttcgaggtgagcaaggcggcctccggccagctgccggtgagcctcaaacggctggacctggcccgcctgctccgccagaccctggcggatatggaccagcccatccaggagagcgggctgcagctgcgcacccagctccccgaccactcggtgctcatccagggggacagtgaccgcctctaccgggtgttccagaatctgctgggcaacgccttgaaatactccctggccggttcccgggtgtacctgaccctcacggtggaggagggacaggcggtggccgccctgcgcaacacctctgccgcagaactccgtcccggcctggactacacccagcgcttcgtccggggggacgagagccgtaccgacggcggcagcgggctgggcctgtccattgcctccagctttgtccaggcctgcggcggtcagttccaggtagagacccaggccgacctcttcaccgccctggtctccttccccttggacgcctccccgtccgatcccaggtgatccgcatttcggaaacagccgtacgggcggacttttttgacaaatggaaaggcccaggcgcttttgcgcctgggccctctgtgtcaatggggttacggtccttccgcgcggacggggcggagggcggcctcctcggtctgatcgggatacagcttccgcagatggcggatgcagaggatggcggcggggatcaggaacagatcggcgctgatccaggccaccggggaggcaaagcaggcggcggtgaagccgaacagggggacgaagacctggcccatcaccgtccgggcggccatctcgagcacccccgccaggatggccagctgactgaagcccatcccctggatggagaagcgcacgatattgaccagggccagggggaagaagaaagcggtgagggtagtgatatactggctggtgagggacacaagccgggcaagatcggcctcatcctggttcaggaacagcatggcgcactggggagcgaagagcagcatggcccccacggccagcacggcatagcccagccccagccaggcgcaggcccgcatcccctgtcccagccggtccagcttgcaggcccccacgttctggccgcagtaggtggccatagaggagcccatggcgtcataggggcagcagatcagctggaacagcttggctccggcggccaccgaggcgatagcggcagttcccaggccgttgacggcggactggaggatgatggagccgacggcggtgatggagtattggaggcccatggggatgcccatccagcacagaaccttggcggagtggaggtcaaaccgcttctccgccccctgcatgcgcaggatggggaagcgcctgaccatgaaagccagacaggccaggccggacagagcctgggagagcacggtggcgatggccgcccccgccactcccgcacggaagagcagaatgaaagcgaaatccaggccgatattcaggatggaggccagggccaggaaatagaccggcgtcttgctgtcccccagagagcgcatgatggcagccagcaggttgtagaggatggaggccgggatacccatgaagatcacgaagatataactgtacgcatccgcgaagatctcctccggcgtctgcatggcggtcaggatcgtacggcacagcaggccggtggctgcggtgagcaccacggcgatgcccgcccccagataggcggcgttggctacgtatcggcgcattttggagggctctcccgccccaatgcgctgagctaccgggatggcgaaaccgttgcagatgcccatgcagaagccgatgaccagaaaactgatggagccggtggagcccaccgccgccagcgcggcagaccccagcagtttgcccacgatcatggtatccaccagattgtagagctgctggaacaacaggcccagcagcgtgggcagggtgaagccggcgatcagccgcatggggctgccggtggtgagatcgcgggtcatagggggtccctccttctgatgcggagcggggcgcctgcgcccgtctcctggactgcaatattatagcggtccgcccccctttgggatagagctttttttcacaatcttttccccgctcccctccggccggtctgtcaaattgtcatgaccgggaccgtggggccttctgccacagcggcccgtctcgcccctcagcccttcggagcgtccttctcggtgggcagcagctttttccgctgagagaggaacaaagtcagggtggtggcactggccaggatgtcggcgataggctcggccgcatagatccccatgacgctgccggtgactctgggcaggatgagggccaggggcaccagcaggatcaccttccgcagcagggccaggaacaggctggtcctggcctgaccaagggccatgaaggtgctctggcaggccatctgggcgccgaaggcccagatgcccccgaagaagaggggcatgacccgggacaccagctggatcagctcctgctcaggggtgaagatacgggccagcacccccgggatcagggccaccatgacaaaggcggagcaggtgaccgtcatggtgacggccagcagccgcttgaaggtctgccggacccgccggtagttcttggccccgtagttgtagctcataatgggctggaccccctgggtgatgccctgggtgggcatgacgatcatctgcataatggactggatgatggtgatggagcctacatacaggtccccgccgtaggtctgcatcccggtgttcaggaccacggtcaccaggctctcggtggactgcatgataaagggtgccacccccaggccggcgatcttccccatcactctggggtcaggccggacataggcgcggcggatgcgcaggatgctgtggggacagcaaaggaaggcaagcacccaacaggcgctcaccgcctgggacaggatggtggccagggccgcaccccttaccccccactggaaaacaaaaataaagatggggtccagtacgatattcagcaccgcgccgatgagcacgctgagcatggcggtcatcgctttcccctgggcactgatgaaggtgttcaggcccagggccagctggacgaagaccgtgcccagcagatagatgccgatgtagctggaggcatagccaatggtggcgtccgaggcgccgaaggcccgcaggatgggctccttgaaggcgctgaagcccaccgtcagcactgcggcggtcatcagcagaagggccagagagttgcccaggatccgctccgcctggtccttttttcccgcccccagctggatggcggccagcggcgcgcctccctgcccggcaaaggcggcaaaggcggacaccagcgtaatgatgggaaaggtcacccccaccccggtcagtgccaggtcccccacctcggggatgtggccgatgtagatgcggtccacgatgttgtacagcatgttgatgaactgggcggccaccgctggtacggccagcttcagcatcagacggccgatgggtgccgtccccagcacatttgatcctctctcctccacaggagtcacttgcctttcttttctggattttgagtcaaagccccagcccatagacccggttggcgttgtcaaagaagacggcggggcggcgctcctccggcacgatgcgggtgacgtagtcccggtattctgacagattgacgatgggccagtcggtgccgtacaggaagcggtcccagcagcccagatagtccatccaggtgcgcagcagccccacgtatccggcccgctccacaaagtagcggtccaggtccgcacgcccctccagcagcccggacaggtcggcgcacacgttggggttcttctccagcaccgccgcggccgcctccaggaaggggttgccgaagtggcacatgacgaaccgggtcctggggaagtccgccgccgcctcgtccagcgccagggggtggctgtacttcaggtgggcccgggggtgggcggtgagccccatatggaccgctaccggcttgtcataccgctccgccagacggtagacgggctcgtacaccggatcggacagccagatccggttgtacccggggtagagcttcacgccgcagcagttctcccgcttcagatgctcctccacctggtcgggcaggtcctccgggatgtggctcccccggcggagcaccaggctgtccagccccacgcagtagtggaacaggtcccgggggtagttgtggaagccggtctccaggctgcggttgcccatcaccaccccgtggacgatctccagctccccatagacctgccggagatgctccaccgagttctcgtgccccaccccacgggccatggcatcggtccccggctcggacggaaagatgtgcaggtgcgcgtcaatgatcttcataagtccctcctctgatccggcggcgcagccaggccgcgcccccattcaggccaatggccagcagtgtggagagcaccgccaccaggaaggggagcagccagctccgctccatggcccaggcaaagcccggcacagtgtcgctccactccttcatcaccccgtagatgggcacatgaaaggcaaagatataaaaggtcagctcccgcccgcagcggcaggcggtcctcctcagcaccgggcttttcaccgccggaccggccacacaggccgccatcacgcacaccgcggccagcaccgtccccacatggaggtccaggaattccgtgcggttgcgctcccacagcgccagaagggaccccgccgccgcccccagccagagccagcccggccgcagggcctcgatccgctcccgctgcgatcccatccaggtgcccaggaggaagaagggcaggccgtccagccacacgtttcggatgcgcacgctgtccactgccagcccctggaggctccggccctcccccagcaccaggtggacggccagcaggcccagggccaggaaggccagcaggcggtggggcaggtggctccggagcagcgcggtgaggccccaccacatcaggtagatcatcagcagcgcggccagaaaccacagcggccaggagtagggcaggggaaagagctgccacagtaccagcgatgctgcgttggcccaggtaaagcgccccagaaggtaggcacccatggaggcaccgccgtgtctggccatggcgcacccaagactcagcagggcgaggcaggcgaagagcagcaggccggcggtgcggaccgtccggcgggccagcacacggggcggactgcgccagctgaaaaagccggcggagaggaaaaacagcgggaccgcgaaccgggccaggcagttcaccgccaccccgatctgtcccggaaggaggatatggataaagatgacgctgtaaatggcgacacatttccacaggtccagcttgtcgttgtgtccgctcccgcgctccatgcgcctcacctcctctggcctgtaacgtaacattatatcacagccgcccgggaaagaaaagccgagtctgtcccgatcttcctccctctctcgttgagttgttgtccacaacttcaactttaaccgatgaggcattgtcctccatcctttttattcatctgtccagcatgtattgtactcctacagtaggcgaacgaccgggggcaaaatttttctttacaggggaagcgggctgtggtatgatgccggggacgagttcccacatctcgtccaagcacggtcgtgagacgcgccgtgttcgttcgggaggccatgcctctcgttctctaaaaaagaaaatggaggtttttttatgcgcaaatttaccacccgagacctgaccctggccgctgtcctggccgctgtctacgcagcgctcaccatcactctgcccgtgccccagtacggagcggtccagatccggttcgccgaggccctcaccgtgctcccgttcctgttccccgccgccacgccggggctgtttgtggggtgcatcatcgccaacctgttttctcccttcgtgctggatgtggtgtttgggtccatggccaccctgctggcctgcctgtggaccagccggatgaccagccaatggctggcacccctgccccccgtgctgtgcaacgcagtgatcgtgggggcggagatcgcctgggcggagaccggcatcactcccgcgttttggacggcattcggcttcaacgccgtgacggtggggctgggtgagctgatcgcctgctatgctctgggctccctgctgctgtccgcaatgcctcaggtgccctatttcagggggatgatcccggccgagcggctggagcggctgttttcccgtgcggggcgggagcgggcctgaagatagaacgagaaagagatcaccggtcgggagacccgtccggtgatctctttttgcgcatgtttggggtgggacatgcataatctggagggtgtgagagcgatcaggggaaaagagggagggcgggacatgagattccaggggcgagacgccgccagggggcggaggatgcggaaggatctgggccggacggccggagcgggggtggccctggcgctggtcctgttcctgatgcccgccctgctggtgcggcagggggaattttcccaggagcttctgccccagggaacactgcctctccatcggacgccgtccagcgtctcgaccgccagccaggaccgggggcgggtagtgcggctgagccgatcggacgggacagtggaggagctgaccatggaggagtacctgtggggggtggtggcagcggagatgcccgcttcctttgaggaggaggccctgaaggcacaggcctgcgctgcccgtacctatacggtcacccttcaggaggcatccagcccccggcacccggacgcccagatctgcgatgacagcggctgctgccaggcgtatctggaccgggcggaggcggaggcccgctggggggccaatgcggaactgtacagcggaaagatccagcgggccgtggaggagaccgatggactgggggtgctctataacggggcgcccattcaggcggtgtttttttcctccgctgcaggccggacggtgggggcagtggaggcatgggggaattcggtggactatctggtgggagtggagagcccggagggggaggaggtgcccaactaccacagtcaggtggtcctgacggcggaagaggtcaggacggcggcgctggcccagtatccgggggcggacctgtccggggacccctcggggtggttctcgcagccggtggaaaattcagccggcggagtggcctccgtggatctgggaggcgtcaccctcaccgggagcgaggtgcggactctgttcgggctccgctccgccagcttttccgtatcctgggacggggaagccttcacctttgacgtcaccggctacggacacggggtgggcatgagccagtacggggccaatgccatggctagggaggggagcgatttcgaggagatcctcacctggtactacactgggacagaggtgggggagctgtacggagcggcgggggaataagatcggggaaacagcccccgccgcaccggaggcccctccgcttctcacagagggccgtcccgtccgccgcggccgcagcacataggaagagcagcagatacgggaacacggcccgatgaggagtggaccagagagcagaattcaaagaccatcccgcggggcggtgcctccctatatgagcacctggagcaacagcagagccggcagatgcaggccggcctccgaatggcattgggaagaggcggggatacaaaaagggctccggcagcttctgactgccggagcccttccatatttcatccatcaaaggtcaatatgccacgccccagtagatcatgtgcttggcgggcttgccgcagcagacgcaggtgtcgcccaatgcctcctgcttgaggggcatgcaccgggaggtgaccccggcctgctccttcattttcagctcacactccagctcaccgcaccacatggtcttggcgaagccgccctcgccctccatgaaggacttgacttcgtccagggtgcggcacaccttggtgtggtcctccagattctgtttagcccgctggaacagtccgtcgtggaccgcgtccagcagctcctgaaccttagcctccagctctgccagggggacgaagaccttctcgccggagtcccggcggcagatgcagcactggcccttctccatgtccttggggccgatctccacacgcagggggacgcctttcatctcgtactgggcggccttccagcccatggactggtcgctgtcatccatctgggcccggatgcccgccgctttcaggcggtccagcagggcggcggcggcgtccagcacgccctccttgtgctgggccacggggatgacgatggcctggatgggggcgatgcgggggggcaggaccaggccgttgttgtccccgtgggtcatgatgatgccgccgatcatccgggtggacacgccccagctggtctggtgggggtagtggagctggttgtccctgccggtgaaggtgatgtcaaaggcccgggcgaagccgtcaccgaagtagtggctggtgcccgcctggagggccttccgatcatgcatcatgcactccacggtataagtctcctccgcgccgttgaatttctccttatctgtcttgcggccccggaccacgggcatggccagcacattctccatgaagtcggcgtagaggttcagcatccgcatggtctcctcccgggcctcctcctcggtggcgtgcatggtgtggccctcctgccacaggaactcccggtggcgcaggaaggggcggctggtcttctcccagcgcaggacagagcaccactggttgtacagcttgggcaggtcccggtgggagtggataatgtttttatagtgctcacagaacagggtctcagaggtgggacggatgcagtagcgctcctccagcttctcgctgccgccgtaggtgacccaggcgcactcaggggcaaagccctccacatggtccttctccttctggagcagggactcggggatcagcatgggcagatacacgttctcgtggccggtctccttgaaccgacggtccatctcccgctggatgttctcccagatggcatagccataggggcggtagatgaacatgcccttgatggaggagtagtcgatcagttccgccttcttgcacacgtcggtgtaccactgagcgaagtccacctccatgtcggtgatctgctccacctgcttcttcttgtcattggccattctagatccgtcctttatcatcaaactaaaaactggcgcggccccgcagggccgggcatcagatcaatgtgtcccatccattttataaacagaaccgggaaaagtcaaggaaaacaagcggtatgggaggcccagacaaggggaattctatatcctcagccacgccgcggcagcggacctggtaggctgaggcggggcgagaccgggccttttccttgcgcgtgggccgattttgtgttacaatgacccgaaatgcacagagcaggcggcagaggatcatccacgccgcctgccggggagacgagaaagagcgatgacacgatacgacgcaggagaatttgatgtggccgtcatcggcgcgggccacgctggcattgaggccgccctggcctgcgccagaatggggctgcggacggcgtgcttcaccatcaacctggatgcggtgggcaacatgccctgcaacccggccatcggcggcaccggtaagggccatctggtccgggagctggacgccctggggggcgagatgggccgggcggccgaccgggcctgcatccagtaccgcctgctcaaccggggcaaggggccggcggtctggtccctgcgggcccaggcggaccggcgggaatatcagaaggtgatgaagcacaccctggagcgccaggaaaacctgtgggtgaagcagtccgaggtggtggacatcctcacagacggaggggcggtgtccggcgtggtcacttacaccggggcggtctaccgggtcaaggcggctgtggtggccaccgggacctatctggggggacgcaccatcgtgggggaggtggtccgggactccgggcctgacggcctggctgccgccgtccccctgacagcgtgcctgacggggctgggcctgaccatccgccgcttcaagacgggcacgcccccccgggtcaatgcccgcagtgtggacttctcccgcatggagcggcagcctggggatgaggaggggctggccttctccttccagacagagcgcccgccggagaaccgggcggtctgctggctgacctataccaaccagcgcacccacgacatcatccgggccaatctggaccgctcccccctgtacgatggcaccatcgagggggtagggccccggtactgcccctccatcgagaccaaggtggtccgcttcccggataaggagcgccaccagctattcgtggagcccatggggctggacacggaggagctgtacatccaggggttctcctcctctctgcctgaggaggtgcagctggagatgctgcacaccgttccggggctggagcgggcggagatgacccggtgcgcctatgccatcgaatatgactgcgtggaccccacccagctggaggccaccctggagagcaagcaggtgccgggactgtacggagcgggacagttcaacggctcctccggctatgaggaggcggcggtgcagggctttgtggcgggggtgaacgccgccctgaagctgttgggccgcccgccattgatcctccgccgggaccaggggtacatcggggtgctcatcgacgacctggtgactaaggggaccaacgagccctaccgcatgatgacctcccgcaccgagtaccggctgctccaccgccaggacaacgccgaccgccgcctgactcccatcggccgcgggctggggctggtgagccgggagcaggcggaggcggtgcaggtcaagtatgaggcggtggaccgggaagcggcccggctggagcgggccgggacacctccctccgctgccttggacaccctgctggcggagaaaggggagcctccggtgcgggacggggcccggctggccgacctgctgcgccggcccaggatcacctatgaggagctggctcccttcgacccggagcgccccccccttcccagggagattgtccaggaggtggagatcaccatcaagtatcagggttatatcgaccggcagctgcggcaggtggcggagatgaagaagctggaggaccggcctctcccgccggacctggactatgaggccattggcggcctgcggctggaggcccggcagaagctggcccagatccggccccggaacctggggcaggccagccgggtgtccggcgtctcccccgctgatgtggcggtgctgatggtctatctgggcaagtgaggacaaaggagaagaagatgaagctgacacaagtgaagggcagcacctgggtgctggaggccaacgagctgatccccctgtacctgctggacgaccggcggtgtgttctcctggacagcgggctggccaaggagcgggaggagatcgagaagaccctgctggaggcggggctggagccggcaggcatcctgtgctcccacgcccatgtggaccactgcgccaataaccggtattttcaggagaagtatcacctccccgtggcactcaccgccccggaggcggggatgtgcagcagtatcctgaatttgaagtgctaccggctgctggtctcccccgatgcggcagagcaggagatgagcgagatggtgcacgtcccggacctgatcctcccaccggtggacgggcccatccggctggcgggagccatgttccgcatcctgcacacaccggggcactcctccggccacatctgtgctgtcaccccggacaacgtgtgctacaccggggacgccctgatgtcccaggcgttgctggacgccaagctgccttacggcctgtccatccagctggccatggagagccgggagcggctgcaggagctggaggactgcgacttctttatcatggctcacaagggggtgtgcaccggaagagagatcggccccctcatcgacgccaaccaggagctggtgcgccgccgggccggagagatccgggacctgatcacagagcccatggacttcagccagatctgccgggcggtatgcacccggttttccctgctcacccggcggccccgccgggcgctgtactacgagcggaacatccgcctgttcgtggagtatctgatggaccagggggagctgggcatggagacccgccaggggacggccttctacctgccatcaaagaaaatatgaggacagtataaccgggccccggagatatttgatctccggggcccggtaaattctgtgcggaccgttaacgagcatattgctgccagctggtcggcgtatattcaatattatataatttttgcgggtagataataacaaggtttaatatcgagaaattacagaaaaattaaaccaaaaattcgaaaaatttatttcagaaatagaaaagctcctcaaattttttgtccagcgcgatgcacagcaccagggccagcttggcggtggggttgaactggccggtctcaatggagctgatggtctggcgggacacgcccaccagcttggccaggtctccctgggacagaccgcgctccgcccgggccacctttaagcgatttttcaagaccagctgttcatccatgtcctcaccatccctgtgtgaagtatcttaccagattccaggccaaaaaagcaagagagatcagcagcgtcaccacgtcggaggtgttcctccgcttggtgagacggtagaggcggttgcccacacaggaggcccagaacatagccagcacactgttggcaggcaggccgtggagccggttgaagatcacgatcactacccccaccagaaagaccaggatcaggctgaaggactccccctcgatgcggacagtgcgctccatctcgtcctgaaggacgttttctttgcggcttttcgccaggatctcttccttgttcatggatcatgctcctttcttttctcattgggcgggcaccagcgccagtaccagcagccgcagcattcccgccagcagggccagcaggaaaagggcggacagcagcacaaacgtcagtaccagcctggccggccccagcggtctggccgggctcacggcagggtctccaggatgtaggagaccagggagaagagggaggccagtccggccagcactgcggtggccagcacgctcttttccttccgggcaaagtagcggcctgcggcctcgcaggagagataggcccaaaacagggtcaggggcagggagttgtccagcccccggaccatgttgtagatcatgatgacaagaaacagcaccagaaatcccaccacgccgtactgccggccccggtcctgggcataggtcaggccctcgtccttctcgcggcggctccgcttcagaatgtcttccttgtccatcatagcagcgctcctttcgtttggtgagacaagcatatcacgtcaccccaaatttgtcaagtaaactttgcaaaaaaataataatactttgcaagatgacaagcgtaataagatgacggggaacggcagagggccgctccccgtatgaggtcaggaacgaaacgagagcctggagtctggctgaaaggggaggcggccggggttgccctccgcacgcaggaggatgccggaggccgtgtcatagagcacggaccagacggtgtcccggccctccctgcggtcatactggcacaggaagcccatcctgccggagagcaggtcctgtccagcttggaggtcgagctccgggccccaggcggccagggagcgggtgagggtcagatagcgctcttccgcccgccagtcgtcgtccgtctgccggcggaagggggccatggcggagaggtggaaggaattgacggagcagacgaaggcgtccgtctccccgggacaatggatctgggtgcgctccggggcacactccgccagggcgatacgcccagcccggtcggccagcaccagcgtgtggcaggaggagacggggagctgccggagcagcgccagggcctggggaacatcccggcaggattccagcaggagccgcagggtcagaccagcattcagcccggggcggggtgggttggggggcaccgaggtgagtcccgccgccagtccgaactgattgacgccgtcctccatctggaggaaggaggtggtgttgcccacaaaagaatagccgccgtcggaaaaacggtataggcagttggcgttgtgctcttccagctccgtgagaaagtcgctgttccggccgaacagggcccctctccccctgcgcagggcaaagcaggagcagcaggggccgggcggcatggcgtacatggagaagaggaccccggccagttcgtccggggcacacccctgcccctgggccagcccccgcagctcctccagggcggcggggaaccaccggcggcagaggggcaggcaggtccgggcaaactccagccgcgccggggtgatgggaaagggaacagcgtccaggataaaatggccgtcccgggccagaccggctcccagctggaagccgatctgccagtgtgtgccgtgcagttgtgtgtgaagcataaaaacgctcctgttctgttcagatctcagagtaaagagcgcggcgccgcctctcaaaagaacggtagcacaattaaaatattggagcaaggccgatttattttttaaatttttttattccaggccgtttttggagggctggcccggccccgctcctgcaaaagactttgaaattttggattttggacgggaagggcttgcatttgcggggaaaaaacgataaaattccaaatatctatgtcaaatgatgaaatggcccccgggccgggaaaggatactgctatgagtgagacatttcagggaagccaggactatgtcgcttccgaggaactgatgcgggcggtgaatatcgctatggtgctccagaagcccctgctgatcaaaggggagccgggcacgggaaagacggtgctggctgaggccatcgccaaatccctgggcaaagagctgatcatctggaatatcaagtccaccaccaaggcccaggacggtctgtatgtctacgacgtggtccagcggctgtatgacagccaattcggcggcgagggcgtggacgacatcgagaagtatgtcaagctgggcaagctgggggaggcattcaccgccgacgaccaggtgatcctgctcatcgacgagatcgacaaggccgatctggagttccccaacgacctgctgtgggagctggaccggatggagttccacatcccggagacgggacgcaccgtcaccgccaagcaccgccccatcgtcattatcacctccaatgcggagaaggagctgcccgacgccttcctgcgccgctgcgtattccactacatcgagttcccagaccgggagctgatggcagagatcgtcaacgtgcacttccaagatctggaccagcatctgctggaccaggtgctggaggccttctaccgcatccgcagcctgccccagatcaagaaaaagccctccaccagcgagatcatcgactggatacaggccctgatccacgggggctatgaccccgaccgcgtcgtggccgaggtgccctatctgggcgtgctgctgaagaagaacgaggacatcgacgccctgcgcaagagctggcggtgatggtatgttcggtgattttctctatctgctgcgccgcagcggcctgaagatctccctcaccgagtggatggctctgatggaagccctggacaaggggctggagggggccagcctcactggcttttactacctgtgccgggcactgctggtgaagacggaggccgacttcgaccgctttgaccgggctttcctggagtacttcaaggacgtgcccttcgagcaggaggtgtcccaggagctgctggactggctggaccgccccgatgctctgatgggccggtatgacgagcagcaggccgagctcaatgagctgctgtccaacacagagatcgaagagatgttccgagagcggatgaacgagcagcgggagcagcacaactgcggcaactactgggtaggcacccacggcatgtccgtcttcggcaactcgggcatgagccccaacggcatccgggtggggggcgagggccagggcaagcgggccttccgggtggcgggcgagcgccgcttccgggatttccggggggacaacaccctggacacccgccagttccaggtggccctgcgccatctgcggcagttctccggcctggtggacctgcctgccactgagttcgatgtggacaacaccatcaaggacaccgccaacaacgccggctccctgaaggtgcgctataaaaagccccggcagaacacagtgaaggtgctgctgctcatggactccggcgggtccatggagtattacagccgcctgtgctccgctctgttccaggcggtgagcaagtcgggccatttcaaggacctgaaggtgtactatttccacaactgcgtctactcccgcctgtacaccgagcccaccctccgtcccagcaacacggtgcccaccgactgggtgctgagcaacctgtccagcgagtacaaggtcatcctggtgggggacgcccagatggctccccacgagctggtgacccagttccgctaccgaactccggatggggaggagcacaagcgctgcggcttggagtggctccagatgctcaaggggaaatatccccatatcgtgtggctcaatcccggcgaccggcccacttggggggagtactggacccggacctatgataccatcggccgggagttccccatgttccccctgacagtggaggggctggaggaggctatgaagaagcttctggtgcggtgagcaccggttttcctggagcgggccaaggccggacgcggggaccccgtgctccggcctccgtttttctctgtgcccggggcggaagagacccatcttgtacttgtatttttacgggaaatagaataaaatatgaccagtatcagtatgaaagcccatccagagggcgcgccgcgggagagcccgcctcagggcccgccgtccgccgcggccccggccgccctggtgaaaggaaggatgcaaccatgaaactggaaaacgatctgggcgagatccgcatcagcagcgatgtgtttactgccattaccggcagcgccgccaccaactgctatggcgtgaagggcatggcggtccgctccaagaccgacggcctggtccatctgctcaagcgggaatccatggccaagggagtcaaagtatattacaacgaggacgggaccgtctccatcgagctgcacatcatcgtggaaaacggcgtcaatctggtcgccgtctgccgctccatcatgagcgaggtgcgctatgtggtgagcaagaccaccggcgtggaagtgagatccgtggacgtctttgtggactccatgcggttttaaccatttgtagaaaggaacatcgccgatatgacacagaccattgacgcagcggcctttcagcagatggtcatccatgccgccgccgccatcagtgcccagaagcagcacatcaacgacctgaacgtattcccggtccccgacggggataccgggaccaatatgagcctgaccatcagcgctgccgccgcggagctgaagaaaaagcagtgtgccaccgtgggagaagcggcccagacagcggccagcgccctgcttcggggggcccgggggaactccggcgtcatcctctccctgctgttccgcggcattgcaaagtccctcaaggaccgggagaccatcgacggccgggatctggccatcgccctggacttcggcgtggccgccgcctataaagcggtgatgaagcccgcggagggcaccatcctcaccgtgtcccgcctggctgccgctcaggccgccgccgccgcccgggaggagaacgcggcggagtccgtgctggaggccgccattcgggaggggcaggaagccctggccgacaccatcaaccagaacccggtgctgaagaaggccggcgtggtggacgcggggggcaagggcttcctggtgatcctccaggggatgctggacagcctgcggggagagcccatgcctcaggtggaggaggagtccgccccggcggacaaggccgacttcgtggccatggccgccgaggacatcaccttcgcctttgacaccgtattcatcgtgcgcaagcacactgaggaggtggatctggagcccttccgcacctatctgaacagcatcggggacagcctggtcatcggagaggacgacacggccttcaaggtccacgtccataccaacacccccggcgccgcccttaccgagtcccagaagtacggcaccctggagctggccaagatcgagaacatgcgcacccaggccgatgacctggcggcgggcaagcacgtgcagagcaccgacgacctggaggcggtggaggccgaactggaggccggcgccgacggcggggcgccggtgaaggccgccccggagaagaagtatggctttgtagccgtctgtgccggacaggggctggaggctgtgttccgtgacctgggggtggacggagtcatctccggcggacagaccatgaacccctccaccgaggacatcctgcgggaggtggataagactcccgcagagatcgtctatgtgctgcccaataacaagaacatcatcatggccgcggagcagtgcgtgcggctgtgcgaggacaagagggtggtggtcctgcccagcaaaacggtgccccagggcatctccgccatgctggcggtggacttggatgcccaggaggaggacaacacccaggccatgactgaggcgcttcagaatgtccacaccgcggaggtcacctatgccgcccgcgactccgactttggcggcttcaccatcaaacagggggactatctggccctggaggagcaccagctgttcggtacggatcaggacctggacaccctgctcacccggctggcccaggccccggagcaccaggatgccggcttcatcaccatcttctatggcgaggatgtgacggaggagcaggcccaaaaggccgcggatatcttcacggaggcgtgtccctccgccgagatcaacctgctgcccggcggacagcctgtgtattattacatgatctccgccgaataagtgcaaaaatatcgggagcagccttaggctgctcccgatgtttttttggatattccatgcaggatgtaaaagaagaggggatgaggagctcagccctccccctggacattggggtcggcctccggcttgtagaagttggtcttcacacggacctcccgctcataggggaccacgccggcctcgcgggcggcggtcatggagcggagcagccaggccatattgtcccccaccaggcgcagggtctgcatcccctccagatccgcccggacctcctccggccggtccccgtggacgccgttccaatactgggaggacaccaccggcatggaggagatggtgaagtacttgttgagctggtcaaaggtgttgccggccccgccacggcggcaggtgaccacggcggcggcaggtttgtagaagaacagccgcttggcgtcgtagaacacccggtccagcaggcacttcagcccccccgcgatgccgccgaaatagactggggagcccaccaccaggccgtcggcctgaatgatcttctggatgcactgattgacgctgtcatcgtcgaaaacacagcggcccttgccccagcaggatctgcagtcgatacacccccggatgggctgattgccgatccagaagatctcggtctcgatctcatgcttctggagctgagccgccacctcggacagggcggtgtaggtgcagccctctttgtgggggctgccgttgatgagcaggactttcacacgtatctcctcctttgggcatcttgagccctttcccatatgctcccattgtaccgcgccgggccaggatttgcaatgagaatcgaaaacacgggagagatcgggcaaaagcgggaaaaaatgggagtctcccaggcgaaagattctttaccgggcgtgctccgcgtgatacaataaaaaaataacccggaggcggccctgagcgcggacaggccggcctcggaggagaagagaggcggagcctatgcatgagaagctgatccgagagatcaacggggagatcgccgacgcgctgctggcgcggaagctgccctttgcccccagccggaaggcggcgctggccctgctgaaggtgccgggatggacggaggggctggagcagatgctgcccatccgggggcggctggagtgcgcccatgtgctggagctgtgctcctgtgtactgccccggctcgccccccggccggaggaggggtggctggccttctgcacccagtacgcccgggagcggatgtaccccggtcaaggcttcgcccctgatcgggaggagtatgaggcgggggccctgtttttcctcaccgtcctccaggtgatgctggaccgggagcggagggcggtgcccttcgaccccctgaaggacttccagttcctctcctcagaggaaatgggggaatatgagtgcggggaggagtaccgccgcttcctggccgccttccgggaggagtacgtctatgagatgatgcggctgagcgaggagaccacccccttccgcaccctggggcacatcgcgggggtgcattacatcgccatgaccgtggcccggggcatccgggaggcgggggagaacgtagacctggcgctggtgtccgctgccgccgccgcccacgacctgggcaagttcggctgccggcccggggagcgtgtcccgctcctccactactactacaccgaccagtggctgctggggcgggggatgcccgccgtcagccacatcgctgccaaccactccacctgggacctggagctggacaccctctccatggagtccctgtgtctgatctacgccgacttccgcagcaagcagggacgggatgagcaggggcgggagaccaccatcctctatcccctggaggagtccttccacatcatcctgaggaagctggagaatgtggaccaggcaaagcgccgccggtatgagttcgtctacggcaagctccacgatttcgaggactacatgcgctctctgggggtggacgtagacctgaccgggcagccgggggcgcggaagccccccaaggacccggccctgatgcccccgaacgagacggtggacagcctgatcctgctgtcggtagagcacaacctgaagctgatgcaccagctgagcagcgagcggaagttcggcaacatcatcgaggccgcccgctcggccaagagctggcagcagctgcgggcctatctggatgtgttcgacgagtactgcacctatctgtccgtgcggcagaagacccaggccctggccttcctctatgagctgctgatccaccgggagggggatatccggcgccaggcagccagcctcatcggaaagatcatcgccaaattccacctggtctaccgcaaggaggtgcctgccgacgcccgcactgacccggcggaggaggtgcccttcaccctgtgggaggagtatctggacaagctcatctaccccgaccacaagaccaccccccagcagcggggccagatcggctataccctgaagctggtggtggacgccctgctggagtacggccggagcgagaccatgccccgcttcatcggggcgctgctgcgctactatgaccggccggaggagaaggacgaggataccgccttcaccctgctggacgccatccgctatctgcccgcccagcaatatgaccaggagacccggggccgcctcatccgctttgcggcctggttcgccgcctccggcaacctgcgcctccaggcggcggccctccagttcctgcgggaggcccagcgctccctgccccaggatcacccccagatggctcagatcgcggcggccgcccggtctgccgccggcgggagcctgccgctgctcttcctgcggtataaggtcctccagcgggcgggggaggacgtgtccgactatcaggcggccctgtatgagcaggacgtgaccagtgagatcttcctggacaacctgaagagcgccacacactggatcatcaaggtggtgggcatcgagctgctccaggaccaggtggagcacggcctgcgggagcacatgctccacatcgccacccacttctccaacctggtgaaggtgtccgagcgggtgggcgtccgccacgccgccggcgaggccctggtccgcctgatccccctgctgcgccgggagcagcgcaacgaggtgatggtggagctgggcaagggcctggagatgggccagtaccagatctccaagtatatcccggagtatctgggccgggctgccctgttcctccaccccagcgagctggacgagcaggtgctgtggctgaagaacctgctgggctcccccaccaacatcgccgtgtccggggcgctgaataccgtgggggtgctgctccagcactaccccgcctaccgggggcgcttccctgagccggagcgggcctatgaggcccgccgccaggagctgctgggcctgctgctccaggggctggcccactaccgggaggaggtgcggcaggaggcccttctggtcaccgggaccatgctcttcgacagcccggtgctctccatggaggagaagtcccgcctgttctccctgtgctaccgcaagctcctcttcctcatccaggcgggcccccgtcaggacccgctgaccttcttctaccgggcttccgccctggcccacatcaaccgcttcatcgccctgcggcggttggacaaggggcccttcgccttctcccagccccggaagatcgcctttttccccggcacctttgaccccttcaccctgtcccacaagggcatcgcccacgccattcgggagatgggcttcgaggtgtatctggcggtggacgagttctcctggtccaaaaagccccagccccacatgatccgccggcagatcgtcaacctgtccatcgccggggacttccacatccacctgtttcccaacgatatcccggtgaacctgtccaaccccagggacctgcgccgcctgcgggagctcttccccggccaggaggtctatctggtggtgggcagcgatgtggtgggccacgccagcgcctatcaggccgcccctgtggactggtcggtccactccatggaccacatcatcttccgcagggcgggccagccccccctgccggagggaaaggagctgggcatcaccggaaaagtgatccagctccagctgcccccccacctggaggacatcagctctacccgtatccgggagaacgtggacatgaaccgggacatctccaccttcatcgacccggtgatccaggacttcatctatcagaacggcctgtacctccgcgacacccaggacaagcccctgctcaacgcccgggacctgtccttccagtgggtggagcggccggaccccctgctggtggccgatgtcactgctgggcaccgggagcgggagagcctgcggaccgctatcctccgggacggggaccagctgctggtgctgcgccaccgtcgggagggcggggagcccatgctgggttggctcagcttccgctatctgtctacagccgacctctactccgcgtttcaaaacgccgatctggcggaccaggtgcgcctgcgggcgggaggtaaaactttgttcatcaccggcctggccgccgaagaggagcaggagaaggactatgcccagctgctggtcagtgaggtgctctcccacgccctggaggcggagtgcgtctacgctgtcttccacccccacgaggggctgtgccccccggagacagaggagctcttccggcggcagggcttcatccgccgggatggggggccgctggaggccgatctgcgggccccggtggtgctgctccagaatttggagaccaccattcaggagcccctgagccgcaaccccagggtgctcgccgccatccggcggggacaccagcggctcgagaccgccctcaccggcctgtatccaggcaacctggtcctcaccctgtctgccgacgtgatccaccaccggctgctgcggatgatcacccagttcaaccaggtgccccaggagcccaccaccccccggaagctggggaaatatatgtgcgtccccttcggtaagctgctccggggcaagactgtgcccaacacggtcaccaagaccatccacaccgaccgggtgtactcccctgacctcagcgagagcaccatcgaggcatttcccaactacgcctccatcccctgccaggtgcgcaccatcaaatcctttgaccggcccgtcatcctggtggacgacctgatgcaccccggggtgcgcatcaaggccctggaccccgtcctgcgccaggagggggtggacatccagcttgtcctggtgggcatcctctccggctacggccgggacctgatgagtcagcagaagcggccggtagacagcgtgtacttcctgccctctctgcggcagtggttcgtggaggccaccctgtaccccttcatcgggggcaacacagtgcgccgctcccggcccccagtccccggcctgctgccgggaatcaaccacatcctgccctatgccgtccctcccttcgccaaagagtgcggggaggaggccgtcttccaactctcccgctgctgcctggagtccgcccgggatgtgatcggcaccctggagcgggagtaccgggcactctacggccggaatctgactctgggccggctggctgaggcggtcatcctgcccctgtgtcccgacaagggcacctgcctgggttatgaccccaacttggccgcgtcggtctatctggagaacgacctggagcagctgctgaggacccacccccggggctgacctccgccgactgctggaaatgatctgcgggaaaccattacgaggtgtaatattatgttctattattatgaaaaggctggaaagctcctggcctctgagcggagggacctcccctatctcaaggcggagcccgccccggggactccgatctgctatctggtggagggggacccggtgctgggccggggctccttcaaggtgaactgtccgggccagctgagggccccccacggcctggaggtgctggacgcctcccgcctgccggactttcccctggacgcgcccctgtccgccgccctggaggaggggatgctcaccgccgtcaataccggccgggcggggtgggagcaggtgttgtcccagagggccgggacggagaaaaagcgggtcaatatcctggccatcggggacgtgggttccactctgctcaccgggctgaagctgctgggcggggatgtgatctcatccatcggcatctgcgacctctccgaccagatcactgcccggtgggagttcgagatggggcagatcagcctgccctgggactacggggcatttccggaagtggaggtcatttccctggaaaagctgtttgactgcgatgtgttcgtctttgtggcctcccggggcatcccgccggtgggctcccaggtgaaggacgtgcgcatggcccagttcgaaaacaacgccgccattgtgaagcagtacgcccgtatggcacgggcggccgacttccaggggctgtggtgcgcggtgtccgacccggtggaccccctggccaagaccgcctatctggagagcaaccgggacgagaacggcgtatgggatggaaagggcctgcggccagagcagatccagggcttcggcctgggggtgatgaacgcccgggcggcctactttgcaaagcgggaccccaggctggcctccttcctgacggaggggcgctctttcggcccccacggcacgggactgttcatcgccaactccatcgaccactacgacgaggaggtctcccgggagctgacccacaggacggtcaccgccaatctggtcatgcgggagatcggctttaagccctatgtagcccctgcgctgtcctccggagccctgtccatcctgcttaccctgcggggggcgtggcactgcggctccgtcttcctggacggggtctttatgggggtcaagaaccgctatacccctgccggggtggagaccgagctgctgccccgtatcccggaccccctgttcggccatatccgggaggcggcggagcatttaaagtcggtattatagagggaaaaccggtaaggacgcgatttgttgtgcccctgcatccgaatggaataacttgccctgcatgacaaagggggtgtcccatgagagaaaaaattttggcccaccgcatccgctggcttatcggtctctgtacatttctggtgcttttcggctgttctggcttccccatctataatttcaccacagggcggcagcttggcagctggtattttatgctaatgctctgtatcggttactttgaaatcggacagctcctgggtgtgctgtatagccggaacaaggtgtggagatcagctgccctcgccctcggtatgacgcttttggggctggcctgccggtttttgatggagtttggtgaggtgtccaatacctgcaactttacgccccccaatgtggcgctccacctctctgtcgctgcggtgatcaccgccctggggtccctgtcctttgtggacggtcggcggccacccctgggaaaagactgaactttccggtctctccgcacatcaacttttgaagaaggtgatctcatgtccatcattttgatccatccatacccgggccggccggaggcggacgtccgcctgtccggtatcctctcccacgccctggcggaccgggaggggaggaccatccgcaccgcggaggagctggacctgaggccgggagaccgggtcctgtttgccctggccctggacggggcgggacagaatttggagtattaccgcatgctctcccggctgcggcgggagccggacctgctggagggatgcaccgccgcgctgatcgtggatggccccggagagctgtacaccaaatccaccgccggagagctggccctggccgcagatatggcgggatgcgccctcatcgggcggccgctggtggaggggacgggctccctggccaacttccgcgtccaggccaaaaacctgggcaccgacctgatgggggcctatctggcggcggcacaggagctggtccagcgtctggacaccttcactttcccccaaaaggagcggcctgagctgctggtcctccacgcctccagccaccacacatccaacaccatggccctgtgggcaggggtgcgggagcggctgggggaggtgtgcagtgtccaggagatcggcctgcgcaacgggacactggacgactgctccggctgtccctacaccatgtgtatccacttcggggagaagggggagtgcttctatggcggagtcatgtcccgggaggtctatcccgcggtgcgccgggccgacggggtggtcatgctgtgccccaactacaacgacgcactctccgctaatctcactgccttcatcaaccgcctcaccgccctgttccgccagacccgcttctatgacaaggccctgttcgccctggtggtctctggctattcgggcagcgacttggtggcccggcagctgatctcggccatgaacatgaacaagtccttctatctgccaggacgctttgccctgctggagacagccaatgacccaggggaggccatggggctgcccggggtccgggatcggttggaccggttcgcggaccatatgctggaagtcctggcccggcgggcttgaagagggcccttctccctcggtgaaaggcatggcggggcgggggataagattattccgcagacagcaaagggctccacacccatcaagggcgtggagctcttttgatccttcagcgctggggcaggtagctcacagggtccaccgccttgccgtcctgggccatctccagatggagatgggaggggcggctgctctcggcgatggcggtctcacccaccacgcccagcacggtgccggtgctgacggtgtcgccctccgaaacagttggcttggcgctgaggttgcagtagatgctggtcaggccgtccccgtggtccactaccacgcaggtgcccatcaggtcgtcatcgtagactccctggaccgtgcccgcgctgatggccagcacgttggtgcccacgctggcggcgatgtccacgccgctgtgggtgcgccagtcgcccatggtctcatcataggccagcacctccaggctgaagccggagaggatctccccctttaccggccaggtgaagacagcgggaacagggtcctcctccaccggctggaccgtctcggccggctcctcctccacggtctgggggagggaagcctcctggctcccgctgtcctctggctcggtcacagtaggcgcggtgggtgtagtgacagagggagtggtatgggggggagccgcattctggctgctgtcgggaaggaccacgatggggctgccggtgaccggttccgcctctccgggggtgctgctgacggtgcgaacaaggtaatagcccgaaattccaatggtggcgacacagaggaaaaggactatgtagaagccctttcccagtacgaagtcgcccagtttctgaaatacggttcgtttcatggaaccacctccgaagcctattgtggacaggcccggggatggttatacattccagagaaaaaattttatggaacttctgccctctgagcaaaaatcgaccgagcgatgagcgcagcgggggactgccctcagatcagggaaggcagtccagagaaaagcagacccggtcctcctgctcttcaaagccggttttttgataaaagtggtaagcgggcgcgtttcttttggtctggagcgagatgttccgaaagccgtgctgacgggcataatttcggatcagctggatccacagggacccgaaccctcgtccctgatgttctgaggcaatgcacaggtcgtcaatgcagtattcaatgccattgtaccagtgccgcagacggcccagagagatcccaatcaggacatcttccgaaaaaagtcccagggccaaagaattctgattgcccatcacgtccagaatataggaatgaaacacatcctcatcctcccagcggtcacaccagggttccgccgaaaaggcatcccggatcagtcctttgacggcctgctcatgcgccatccccaatacttttaacatcatttctgttgacctcccttttctctgtttccataaaaaaagccagactgaaacagcctgactgatggtaggtgctcacccaataggtctattgttataatatcatattgcctggcaaaaagcaaccggagggaaaaaggccgccggaggaaatcgtctcctgattccgaccatgtttttccaaataatggattataatgtggggcacaacgttccggacaagccggaagctacataggaggagacgagatggcggccagagaggatctgaaaatgcggctgacgaggctgcgggggcagacggcccggctggggcggacagggctgagcggcccggcggtgctgcggacggcagaggtgggcatccatctaatgctggcggcggtgctggcaggggcggaggtgttcggcggcttcgcccccttcggcgtggccatggtgggggcatcaggcaccggactgtgcggcggggcggccctgctgggggcgggattcggctatctgaccctgctgggcttctctgatgcgctgcgctatctgtccgctgccatcctgaccttcgcggtgggctttgcattttacgacatgaagctcttccagaggccctggaccatgcccggggtggcaggcctgatgaacggctgcaccggcttcatctacctgtcccaggggggctggcgaacagtggacgtgatctacttccttagtgagatcgccctgacggtggccgcggcctggtgctaccgggtgctgctgctgcctatacggcgggggagcggggagggggtatgctccgcagcccggcggaccggggccctggtcctggtgtgtaccaccttgatctccctctccaacctgtatctatggaaggatgtctccttcggccggacgctgggagcctgtctggtgctggcgggggcctggcagggcggactggcggcaggagccgtacttggggtgaccatcggcttgtccatggatctggcgggctcgggcgtcccactctacgccatggcctgggggctggccgctctggcagcaggggccttccggggcaagaaacgggtgtgggcggcggcggccttcgcggcggcggacggggccgccgtcctgtggacctgggaccgggggctgaccctggccatcctgtatgaggtgtttttgggttcagtggcttttttcatggtgccggagcgccagtggaagcgcttgggaggcctgctggccccagccccgacggcgcccccggatggcagggcccagggctatgtgcagaaaaagctggaggccaccgccgccgccttccgtaccttgtacgagtccctgcggggctccttccgggtgccggagaacgacaacgatgtggcggcggtctttgaccgggcggcctgtcgggtgtgccggacctgctccctccggtccagctgctgggagcgggactatgtgaccaccttcaacgccctcaacgacgccacggcccccatgctggagcgggggcggggagtggccagcgactacccccgctacttcgccgaccgctgcctccacttccccgcctttgtggaggcggtgaaccaggagctcaccgccctgctctaccgccggcagtacaacagccgcatccgggagagccgggcggcggtgtgccggcagtatggggagctgtccgcccttctggggacggcggcggcagagctgagccgggagctgatcccggacccggcaggcaatcagaagctgaggcggcacctggctctgctgggactggagatggagacggcagtgtaccgggacgagtacggccgtctgcgggcggagctgaagggggagggatgccagactctggacacaccggaggagttggccgccctatcggatctgctgggtgtgcctacccgggcggaggcgggggaggagagcctgactctgatccagctggagccgctgatggcggtagcgggcgtggcagcccggaagaaggacggggagacggtgagcggggacgccgggacctacttcaagcgggaggacggcaccctctatgtgctgctgtgcgacggcatggggagcgggcccggggcgggccgggagagctccctggctgtccgcctgctggagcagttcctgatggcgggggtggagacgggccacgccctggccacactgaattctgccctggcccttcggggagaggaggagggggggttcaccacagtggacctgctccaggtggacctgttcacaggggagggggcggtgtacaagctgggagctgcccccacctatgtgcggagagggagctcggtgcggcggatcgcaggcagctccctgcccgctgggctggccccttcggagcacgcggtgcccgaccatacccggctgcggctggaggcgggggactgcgtccttatggtcagcgacggcatcgccggaactggggacgacgcctgggtccgggagcggctggctaaattcgatggggagagccccaaggagctggcccggagtctgatcaccgacagcccggagggagccaccgatgaccgcaccgccttggtggtgcggatcgcgcggagaacgtagaggtcaagtgcgcggaccctttgcctggcagcaaatgcccctggcggccgtatggatgcggccgccaggggcattttcctacgggatcaaagccgcccctggagcaccgggatgagaaggatcacggccagattgaccgcacataccagcgccagggacagcagctgctccttggattcatcgtccatctccgcccctccttcagatctcttggcaagatccagtgtacggcgggccgggccggaatatacccggtaaaattgggcaagaataactgtgtacacagggggctcacggcaggggccccggaaacggaggaggtatctcatggtcaaaggcatcacacgccaggtcatcctggtgaaatccccggaccccaagctcttcgaggaggccatttttatcgtgaaagaagaggcattggccagagagggggtcagcgcggaccaggtcatccgggaggccagacaggcggcggacggctatctccgccgcagccgggcatggaacgcccggggcaggcagcttcccggaccggcctggggagctgcgggggcggtcctggcctcgctggcctgggggctgggtctgtttctgctgtaacagacctgagacgcatgcatacaatgggatgtggaccgggcggcggcggacccgtctgcccgggctcccggtccaaggctgataaaggagcttacttatgtgcggtatctgcggattttgtgattttacccgggacaacgcgggcccggtctggcgggaagcgggagagcggatgggggagacccttgcccaccgggggccggatggaaagggactctggcagggagcggactgcgtcctggtccaccgacgcctggcggtcatcgacccggagcgggggcagcagcctatggcccgggtgcgggacggcgtggaatatgtgttgatctacaacggcgagctctataacaccgatgagctgcgccgggagcttcggaagctgggcttctcctttgagacggagtcggacaccgaggtgctgctcaacgcctgcatcgcctggggggatggggcggcccaacggctggagggcatcttcgcctttgctttctgggacgggaggcggaggcggctgatgtgctgcagggaccggttcggcgtcaagccattcttctatgcctggaaggacggggcactggtgtttgcatctgagctgaaggcactgttccaatatccgggcctggagccacggctgggccggcaggggctgtgcgaggtgctgggcatcggccccgcccgtacagcgggggcaggtgtattcgagggggtccgggaactgaaggggggctgtcagctgacggccggcccggagggcctccagatccgtcggtactgggcactggagagccgcccccacgaggacggctacgaggagacggtggagaaggtgcgccatctcctggagggagcgatccggcggcagctagtcagcgacgtgcccctgtgcaccttcctgtctggcgggctggactcctccatcattaccgcggtggccgcccgggcctatcaggagcaggggcgggagcccctggagacctactcctttgactatgtgggcaaccggaagcatttcaaggcgtccgctttccagccggacgccgacgctccctgggtaaagaaggcggtccgggcactgggtacccgacaccgggtgctgcggtgcgacatcccctccctgctccagctgctccctgaggccgtggaggccaaggacctgccggggatggcggatgtggactcctccctgctgtatttctgccggaaggtggcggagcggcacacggtggccctttccggggagtgcgctgacgaggtgtttggcggctacccctggtttgagcggtcggagctgctggaggcggacaccttcccctggtgtccggacctggagttccgaagggcggtggtgaagccagagctgtgggagagcctccaggtggaggactatgtccaggcccgctaccagcagtccctggcggagatgccggccctgccgggggaggccctgtgggaacgccgccgccgggaggtcggctggctgtccctgaactggttcatgtccaccctgctggaccggaaggaccgcatgagtatggccgccgggctggaggtgcgggtccccttctgtgaccaccatctggtggagtatgtgtggaacatcccctgggcaatgaaggctatgaacgggcagcgcaagcaggtgctgagggacgcggccgaaggcctgctcccggaggagctgctccgccggcccaagagcccctaccccaagacccacgaccccctgtatgagcagctggtccgggccaggctgctcaccatcctggacgaccgggacgcccccatccacagcctggtggacgagaaagccctgcgcgcagggctgttgtccgacgcaggggactatggaaagccctggttcgggcagctgatggccgggccccagatgctggcctacctcattcagatcaacgaatggatgtcccgataccacttgactgtctgacctgcggtgacagtgcgtttctcctgtttgttcctcctgctttctggcgcgccccatccggggcgcgcttttttgtccctggctttatgatttcttaagaaaaccctaagagctcctttagagcatttgaagcaactgtatggtatcattcatacagtttcaataaaccattttggggcggcggagccgcctgcggcaaggagcgcatgaatatggaagaaatcttgaaggtcacagacctaaaaaaggtctatggaaagcggggggccgctacgacggccctgaacggggtcagcttttccctgagaggcggagaatatgtgggcatcatgggggcctccggctcgggcaagaccactctgctcaactgtgtctccaccatcgaccggcccacctccggctccatcttggtagatgggaaggaattgtccgacctgaggggaaaggaactggcccgcttccgccgggaacggctgggctttatctttcaggactgcaacctgctggacaccctgacggcctttgagaatatcgccctggccctgtccatcgtcaggacgccggcgggagagatccgggaacaggtggaggagaacgcccggctgctgggcatccaggactgtctggacaaatacccctaccagatgtccggcgggcagcagcagcgctgcgctgcggcccgggccatcgtcacccgacccgccctggtgctggccgacgagcccaccggcgcgctggactccagatccgcccggatgctgctggagcggctggaggagctgaaccagatccggcagaccaccattctgatggtgacccacgacgccttcaccgccagctgctgccaccgggtgatcttcctgcgggacgggcagatcttcctggaactgagccggggcgggatggaccggcgggcgttcttcgcccagatcatccgggtagtgtcccaactgggaggagagatggaagatgttctctaagctggccctgcggaacgtccgccgctcctttcgggactacggggtgtatctgctcaccctcacctttggcgtgtgtctgttttatacctttaattccatcgacgggcagggggtaatggtctatctggctcagagccaaaaccccatggcccagctgatccagaccattctggatattttctccgtctttgtggcggtggtgctggcctgtttgatcctgtatgccaacacgttcctcatccgccgccgcaagcgggagctggggacctatctgctgctgggcctgagccagcggcaggtgtcaggactgctggtgctggagacgctggtcatcggcctgatctctctggcggcggggctgctgttgggcctggcggcctcccagggcctgtctgccctcactctgtccatgttctccatccgggtggacgccttcgccctggccttctcccctcgggcagcggtgcgcacagtgggctatttcggcctgatctttctgctcgtgatggtgttcagcggcatccaggtgtcccgggcccggcttatcgacctaatgcagggggagcggaaaaatgaggagctgcgggagaggcccctggggctggcggtggtccagttcgtgctgggggcggtctgcctggcggccgcctatgccatcctgctgacctttggcatggccatcgctgtggcggtcctgcccatctgtgcggccatgctgttcctgggcaccctgggcactctgctgatctttaagtccctgtccggctttgtggtgaagctggtccagagccggcccgggctctacttccgggggctgaacctattcaccctgcgccagtggctgagcagggtccactccacctacctgtccatgacggtcatctgcatcctgctgctgctggccgtcggcatcaccgccagctccatcggactcaactccaccttggaggcggcggccgatgaagaggctccctttgatctgacggtacagaatcagtccgccgacagcgcgggccttgtggacttcccggccgtgctggcggagggcggctttgacctggaccgtctgggagagcagctggacgtactgttttactacaatgacccagcggtcaccggggtggaggaggtgtcggcggctatccggctctccgactataacgccctgctggcccacggcgggcgggggagctgtcaggaggaggtgcccatggtgcctgacgacccagagcgccgggcggtcaccggcgggctgtccctgagctacgcagtggtcccagacgagctggctggacagctggaggtgcggcggcaggtgtggtttgtggactacgccggaggggacgaggagcggacggaggccgagttgatccagctgatccgccccctggacctggactacgccctccacttctccagccgcctggacgcctatcagagcatcatgggctccaagatcctggccctgtttctggggctgtatctgggcttcaccttcctgctggcggcggccgcggtgctggccctccagcagctgagccaggcggcggacaaccagaagcggtacgccatgctccgccggctgggggcggacgacggcctcatcgcccgctcggcctcccagcaggtggctctggccttcctgatgcccctggggctggccctgatccactccatggtggggatgaaggcggccaacgacatcattgccacggcgggcgaggtggactcggtggggagcagcctggccacagccgctgtgctgatcctggtctacggaggctacttcctggccacagccctggcctgccgtcggatggcccggcagagctggaccaagcttgaatgaaagaacagcggctccgcggaagagagcttccacggagccgctgatttgatgtttttaaaattttgcgccgccgaactctgccagctgaaggcccttgttccggtcctggacccactggatggaccactgggaggcgaacagcagcagctgattgcccttgtagtcctccaccagcttggcgtcgttggggagcagcaggtcctcctccttcagcgggggggtgtcctcgtcctccttcacgatccagcgcaggtactcgaagggcaggccctccttgtacagctccacgttgtactcgctgcgcaggcggtactccagcacgtcgaactgaagggtgcccaccacgcctacgatgacctcctccatgccggtgtagggggtcttgaagatctgaatggcgccctcctgggcgatctgctccacccccttgagaaactgcttgcgcttcatggtgtccaccgagcggatacgctcaaagtgctccggggcgaaggtggggatggggtcgaactggaactttttccctggggcgcacagggtgtccccgatggagaagatgcccgggtcgaacacgccgatgatgtccccggcgtaggcctcctcgatgatctcccgttctgccgccatcagctgctgggggcgggaaagacggatcttcttcccgccctggaggtggtagacctccttatccgcatcaaaacggccggacaccacccgcataaaggcgatgcggtcccggtgggccttgttcatgttggcctggatcttgaagacaaaggcggagaaatcgtcatcaaaggagtcgatgatatcctctcccgccttccggggcaggggaggcgtggtcatgcggagaaattcctccagaaagggctccacgccgaagttggtgagggcggagccgaagaacaccggagacagcttcccgtggcgcacccggtccatgtcgaagtcgcaggaggccccgtccagcagctcgatctcgtcggtgagctggtcctttttggcctggccgatgagcccggccagagccgggtcgtccagctcgatctgggtggcagtggcggccctggcgttggtgttggaggtgaaatggatgatctggcggttctggcggtcgtagacgccctggaactccttgccgcagccgatgggccagttcatggcgtaggtgtcgatgcccagctccttttccagctcctcgcacagctcaaaggggtcccgggcctcccggtccatcttattgatgaaggtgaagatggggatgtcccgcatggcgcacaccctgaacagcttccgggtctgggcctccacgcccttggccgcgtcgatgaccatgacggcggagtcggcggccatcagggtgcggtaggtgtcctcagaaaagtcctggtgtcccggggtgtccaggatgttgatgcagaagccttcatactggaactgcatcaccgaggaggtcaccgagatgccgcgctgcttctcgatctccatccagtcggaggtggccgcccgggtgttcttcttgcccttcacctggccggcctgggcgatggccccgccgtagagcaggaacttctccgtcagtgtggtcttgcccgcatcgggatgggagatgatggcaaaggtccttctgcgcttgatttcagattcatattgagacatgagcttcactcctgagtcagtgggatgggggggcaggcggcgctcagccctgctgctccttctgccgctccaaatactcgtcataggtcagcttccggtcgatgagcctgccgtcctcagtgaagtcgaagacccggttgcacaccgtctggatgagctggtgatcgtgggaggagaccagcacattgcacttgaccgcctccaggccgttgttcagggcggcgatggactccagatccaggtggttggtgggctggtccagcatgagcacgttggccccggacagcatcatccgggagagcatgcaccgcaccttctcaccgccggagaggaccttcacgggcttatacacctcgtcgccggagaagagcatccggcccaggaagccacggagatactgctcctggggatcaggggagaactggcgcagccactgtaccagattgtcgtcgcagtccttgaaatattcggtgttgtccttggggaagtaggagaaggtggcggtctgcccccacttcacagtgccctcgtcgggctccatctcgccggcgaggatcttgaacagggcggtgtgagcgttctcattgtcacccacaaaggcgatcttgtccccgtgctccacaatgaaggagaccttgtccagcaccttcaccccgtcgatggtcttggatacatcggtgacaaagaggatgtccttgcccacctcccggtcgggggaaaagcccacccaggggtagcggcgggaggaggcaggcatctcctccacggtgagcttgtccagcagcttgcgccgggcagtggcctgcttgctcttggacttgttggcggagaagcgggagatgaagtcctggagctccttgatcttctcctcgttcttcttgttctgattcttgatgagctgctgcaccagctgagaggactcataccagaagtcgtagttgcccacatacatcttgatcttgttgtagtcgatatccacgatgtgggtgcagatggtattgaggaaatggcggtcgtggctgaccacgatgacggtgccctcaaagtccagcaggaagtcctccagccagttgatggcgtcgatgtccaggttgttggtgggctcgtccatcatcagaatgtccggattgccgaacagggcctgggccagcagcactttcaccttcagacgggcatccagggtggccatgtcgctggtgtgatactccgtgccgatgcccagcccctggagaatgcggctggcgtcactctccgcctcccagccgcccagttcggcgtactcctcctccagctcacaggcccgcattccgtcctcgtcggtcatctcctccttggcgtagatggcctctttctccctgcccacctcatacaggcgctggttgcccatgatgacggtgtccatgacgttgtaggcatcataggcgttctggtcctgcttcagtaccgacatgcgcacgttgggcaggatggacacggtgccgctggtggattccaggtccccggacaggatcttcaaaaaggtggacttgccagccccgttggcgccgatgatgccgtagcagttgccccgggtgaattgcaggtccacgtgagaaaacaggggctgtccgccgtactgcagccccagatcggtgacggtgatcatagtcgtctcgctccttacactccatggtaaaaacagtttgcgtccgctcagtgcacaaagggcggcacgcccgcggtctgcccgccccgaaacgccgtgcggtcctctgcacactgaggttactatcttatcacaaacaggaggaaaaggatagagtattttccggaaaattgggggcattttttcgtttacagctgtttttttgaccaacaggacagcggaaagggagaaaaagcgccccaggactctccactgggagatctcggggcgcggagggggagtcagtgccgtgcgggcctctccggcggacgggaggccaggcgcagggctcggcggagctctgaggctcgggctggggagaaggcgggggctccgccgccgaagtagagctggtccagacagcgggccagctcccccagctcttgggcacagccgggcagctccgccgccgcccggtccaggaaggcgcggcaggtctcccccggccggcggcccctacggcggcgcttcaggcggcggtccagccacaccagcacgccggcgggggtattccgccgggccaggtaggtgagctggaagcggacgcggtccgccagccgggaccacagcattgccagggtgtcccgtgggctgcggcggtccacgacgcggcccctgcggaccggagggtgggaccgggtgcggcttccgccccggcggagggcccaaaggatcgcgccgacgccggccagcaggaccaggccggccagcacatagaggaccgcatcgctgctctggacggcctcgccggccgggccgcctgcggcggagatgggatcgggcaggtttagggagccggtctccggggcagggaagagggagaagagccagcggaagaaccggtccagaagggccagcgccccagaggccagctcacgcagccagccggtgagggcggtgagggcctgggcggcggtgccggtgaacagcagcacgcacagggctgcgcccccgcccagggcggccagcagaaggagaaggagcagacgcccccggagggagccggcggcctgtccgccgggacggctgttggaggctctctgtccggccagggctgccagggccagcagagtgccggcggcgggggccagggctgtgtccagggggaggacaccggcggcggtgcacagggcggcggccagcaggaccagggaggcggtctcgaaggagaccatcagctgctccgcgggcgtggggcggatcagcagctcatagcagcggaagtaggagaagccccacatggcaagcaggcacagccaggacagcagggagggatagcgcaccccccacagccagacgacggccccctggagggccagagcggccagcgccagaagcaggacggagcgctgggtccgggggcgccggagaaacagggccagacccccacaggtcagggagaggcagacgcaccagatgagcaggccggccggatcagaccggccggtctgacggaaggcgaagatggagaacagggtgtgcagggcagtcacattggacagcaggccggccaaatcgacaaggcgggaacggctctggttcacgggcggctcccccctttccgcagggagtccaaggagagggaccggaacccggcccgggcggggacctcccagtcctgggcgcacagcacccacagctgccctgggtccagccgctccatcagggcggcggggaggcggctgccggagcaggtgatcagataggcggtgccggactggggggctgcgtcggcggcgaagcgggaggggagaaaggccggcccctggggggagcgactctcctctgggacccgctgggccaggcagcggtagcccgccagatagaagagcaggtcgtccccgccgccctccccggaggagacggtcatgggaccgaagaggcgggagtgggggagggagagggagcagtccacccctgcgccagacaggccggaaaggacggaggccagtacctccagggccccctccagctccctccagtcctgggagagaccgcagaaggattccccatccagcagaaagcgcagccctctgggctggatggtctggtacaggttcaccggcgtgccctgctcccgggcggccatgcgccagttgatatgcttccagctgtctccgggctggtactcccggcagccccggagcacggtgttgtcctccatccacccctgacggccggcggcgcagtcccactgggggcggagaaagagggagaggtccacctccaccggccggggatagacggcgatggccgggatctgcccggcggggaggggctgttccccctggaccagcccgaagccgtccccggagcgggccaccagtcggtggacccggtacagtccccgccgctgggcagtccaggtgctctcaacctggatggtctgccagctccccacaaaggagaaggactggcgcagggcggggaccggggcgcccccttcctgatccggggcgggctgcagataggactcaaaggcatcgtccggggtgaggcacccctcctccggggcgttttgggacagctccagccagatcagcggcagagacttcccgttctccagatggtagatgagctgggtctgctgcccgggaaagagccgggggcgggggcactccacctggatggagacgccgcgtatggctctgctcccccaccaccgggcggccagccccagcaggaggaagaacaggcatacccccgccaccccgccgctgcccaggcgcagggccagcaggaccccggccccgaacagcaccagggcaggggaagagatcagcaggctggagccccggccgaacagggccttacgctccatggaactcatctcccgccgccggggggacggggagctgggcggcgatctggtccagcaccccgtcagcggtgacaccggagagccgggcctcgttggtgagcagcagccggtgggccagcacggggtggatcagggcctggatgtcgtccggggtaacgaaggagcggcccgccatggcggcccaggcccgggcggcccggaacagggcccgggaggcccgggggctggcccccatccggaccatggggtggctgcgggtggcccccaccaaggaaaccaagtagccggccacctccggggacacccggatctgggagagggagtcctgggcggccaccagctcctccggggaggtgacagtctccagaccgtccagcgggatgctgtctcccagggagaagagcatccgccgctcctcctcaggggcggggtagcccatggagaggcggatgagaaagcggtccatctgggcggcggggaggcggaaggtgctctccgactccaccgggttctgggtggccatcaccacaaagggggtggggaggggaagagtctcgccgtcgatggtgacctgccgctcttccatggcctccagcagggcggactgagtgcgggggaccgcccggttgatctcgtcggccagcagcagattggtgaacacggggccgggcaggcggcggaactccccccggttccggtcgtagatgttcatgcccaggatgtcggcgggcagcaggtcggggacgaactggatgcgcttggatcggcagccggacacggcggccagggtcttgatcagggtggtcttgcctacgccgggcaggtcctccagaagcacgtggccctgggagagcagtgccatgacgatcaggcggatctgcgtctccttgccgtagatgatcttggcggtctccgcagtcaggcggtctgccagctgagcgatatccatagggagctcctccttgtgccggctctcgccggttttacagataagctccattttaccacgattttttgggaattctatccccaatttgtaaagaagtgcccgaccccgccccgaagggctgggcggacagtgcccgggccttccggagccggaagagcgcccgcatggcggtgcgccgctttctgaaatatctgccctgtcagggggcgggagccatcctcagcaagccggacggggacggctggcgaagttccccggaggggcagacagcagagcggggcgctcccgaaggagcgccccgctcttggcgtgtgggtgagagtatggttctacttgggctgatacagctccaggatggccccgtccttccacacgaaggccagctggtcgccctggtcgttggcctgcatggggccgcagatgacgctgtccgcgtcggcaatgtacttctccaggctgtccaccttgtaggccacgtgggggcagcggtgaagcacctcggggaagggggcgccctcctcaaatttcagatactcgatcttgtagtcgtagtcgtccacgttgctcacccagaacttggccccctcgttgtaggtcatgccgggctttttgttggtgatggggataccaatgtgcatatactcagcggacatgaaagttccctcctgatcaggcgtttttgatttcctggtagacctcaaaggcctgctgggcggtgtagcccccgtggaccaccttgccgatggcctgggccatgccggcggggcagtcggactggaagatgttccggcccatgtccaccccgcgggccccctccgcaatggcccggtaggccatctccagggcctccagctcaggcagcttcttgccgccggcgatgacgatgggcaccgggcaggcggcggccacccgctcgaagccgtcgcagtaatagctcttgaccacgttggccccgttctccgccagcacacgggtggccagctggaagaacttttcggtgcgctccatctgtttgcccaccgccactacacccagagtggggataccgtaccgggcgccggcatcggcggtgcggcacagcagctccagggagcgggactcgccgggggcgccgatgaaggtctggacagccatacagtccgcgttcatccggaccgcgttctcgatgtcgcaggcgatgccgccgccattggacatctcatcgaagaggacggtggtgtcataggtcacccggacgcacttggccaccggggcggcgggggaaatgcaggagcggaggatgcccttggtgcccatgagcacgttcacataggggatcaggggagggatcaccacgtcgatgcgctccagcccggcagtggggcccatgatgtagccgtggtcaaaggccagcatcaccgtgttgcccgacttgggatcaaagaggcgggacagacggtttttcatgccccagtcgcagtgggcggcccccttcacatagaagccctcctggaccggggcgatgtccaggtgatagtcgtgggcggccttgtttccgatgttgtcagccatgtcttactccttgctgtacgcaggggtgtggcagggggtgttccacaggcggatgaactcgtcgtcccacttggcgatgttcatctggaagccggcggcctcctgcacggtgaggatctctcccaccatgctggccaccacttccacgcccttggctttcaggaactccacggtgtccttgaacagcaccagcatctccatcatggtggtggcgccgcagccgttgatcatcacgaaggccttgtcgcccgccttcagctccagcttcttggacagggcctcggccacagtggccacggtatccttggaggacatcatgggcacccggacgccgccgccctcgccgtgctggccggcaccgatctccatcaggtcggtctcacccaggtcgccgaaagacatgccgttctgggggtgggtggcgtcggtggacttgacggtgacagaggccatgctgtcggcgtaccgctgggcgatctcggccacctcgtccaggctcttgccctcccgggcggcggcggccgcaatgtgatacagggccaccgcaccggccaggccccgcttgttgtcctccccgctggggtcgtactggatctcctcgccggtgaccacctggcggaagttcagcccagccttctgggccagcttgatggcctgcttgcccgccagctggtcgccggcgtagttcagagtgagcagcagaacgccgtggcccttgtcggccagcttcatggcgtcaaagaccagcttgccgttgggggcggcgaagatatcgcccaccgcctgcacgtccagcattcccttgcccacaaaacccgcctgggcgggctcgtggccggagccgccgtaggtgacgatggtcacccggtctgcgtcggccaggtccttgctgatgactagatggccgtccacctccagaatgtcggggtaggccaggccaagacccaccagctcctcgtcggtgatggtctcgggggagttgataaacttcttcattttcatatatggagtacctcccgttcaaaatcaatggagatgcgctcagggccgtgccagcccctggaagaaataggccatggaggcggccccggcatccggggtcccgatggtctgctcgccgtagctcttggcacggccgaacttggagacgaactgcttgctggcctcggccccctggagcgcggcctgggcggcggcgtcgaacagcccggcctcatcgctgccggagtaggcagcgatggcctgactggcggggatcagggcgtccatcatggtcttgtcccccaccttggcgccggacatgtcgctgagggccttcagcgctttggcaaagatggcctggatgcccgccgtatcgatctcattcccctcgggggcctcctcctggagaccatccagccaggtgttccacagggggacggcactgccgccgttcaggaccatgacagccatggccgcatcgtccagcatggcttggatgccgccctctgactcccctgctgcggcggagacggctttggcgatcttgctcatggtcaggccgtggtcggcgtcgccgaaccgggagtcgatctccgtcagctcctgctctgcggcggtcactgccgcacaggcgttctgaagccgggatgcaaattcctgcttggtcatatggtgtcacctccctcctggacaaaacttaggaaagctcctgctgggctgtgttacttctgtgcatagatactactataaaaggtaacaaaaatcaatagatagatcttttttctctatcattcacgtaatgatatattgaaatttatacaaaacagacaaaaatagaactccctgtggaagaacgatcctccacaggaagttacatatgttacttattggcccagcagggacttgaccagctccgcccgggctgcgatgtgggtgaggatcccggaccgcagggcgccccgcagggctttctcactggtgttggcggagcagacgcccacgatatgagggcactgcttcagcagctccagagggatctggatggcgaagtcctgatccgactggatcaccgtgcctgcctcgttgaagtagtagaccagcagccgtccacaggtgtgctgctgctggagcaggctgccgtaccggaccagggaggcaaagtcggggctggaggggtagtttccgatgttgaccagggcggtgtccatctgaacccactggtcctggatctggcggtagacctcggtggagcacagcagctgcttctcctccaggctctccggcagggcggggagatagaggaagtggggggcggcgcccagctgctgggccatgaggcggacgttttcgttggactggtagttgcgggcagggatgctggcatttcccaccagggggaagatatcagtgacggtgctgctgggctggggattttcctccagccaggtcaccagctggccgatcaggtggccccagcctacccccaggcggcgggcgccgatctgccgcagcaggtccacggccccctgggagagcagctgattggtggcgtcgtcgtcccggccgtcctccaccagcacgcccccctggagggaggtggacagccgcagccggtccagcaggacagcgctctcttcccccggttcgtagacggtgatatgcaccacgcccagctcccgggcctcccccagcatccggctcaccaggggacgggacacccccagttcccgggcaatgtcgatctgcttccagtcctccagatagtagcgccgggccacatgggccagacggaggagcttttccttgctgggcgccaagccgctcacctgcctttctacaccgcggctgttacataagtcaactgtaccatatcggcataacaaatgcaacgggaagggggaagaaaatccgcccggcagggaagggcctctgccggacgggggaaatcagggggacaccagagcgttgagcacccgggaggccacatctccggccgcggaggagccgctcccgccgttctccaccagcacgagaaaggcgtaggggtggtcctcatcccggaggaagccggtgaaccaggcgtggggggcctggccgccccccacctccgctgtccccgacttggcgcacaggtccatattgggaaagcggctggtcccgtaggcggcggtgacgttgtaggccatcatgtcggccagggtctcggcggtgtcccgggcaatgaggcggccggtgcggcgggtgaactggggcagatcgggcaggcccggcgtgtccacctgaaggagcaggcaggggacggcggcccttccaccattggcgatggcccccatgtagaccagcatggagcaggggttcaccgcgtcgtggtactggcccacgcctgcccaggccaggtcgttgtccgaaattccggtgagggaaaagctgccggcggcagtggggatgccgttgacagagtagcggctggtcaggcccgccttcccggcatagcgctccagggtggagccgcccagctccaccgccagctggccgaacaccacattgcaggagttggccagggcctctcggatgtcctgctccccgtgggcggcggtgcaggtgaccgtcccgtccccgatctgggccgagccctcacagacccatgtgcgctcctccaggccgggcagctcctccagcgctgccgccagggtcaccgtcttgaagatggagccgggcgggaaggtggaggagagaaagcggttgagatagacaccatcatagctgggatcggtctccaagccggaggggatgttccggggatcgaaggagggggaggacaccaggcacaggatctcccccgtctggtagttgtagacggccaccgtgcccttccggccgttgagggcccggtaggcggtctcattcaggtccgcatcgatggtgaggtacacctgattgccccgctgggccccgaaggcgccgttgagcaggtcaaagccggtgaggcggtcagcaaaagcggtgagggccccggtgccgatgctgccgtaggggtcgcctaccacgtgaaggatggacttgcggcgggtctccccatcgggataggtgcggctgcccgactggtccacggcagagagcacttcaccgtcccggtccagcagggtgccgctgatgagctgtccggcgctgttgtacaggtggcggttgaagggggaggaggcccagtgccccccgtcggagaagaagcggaaaaggaagagggccaggccggccagcagcaggccggccagcaccaggcagagcacggcccggtgttcgatttttttcacgggacaggtacctcctttccggcgggagagcggatggcaaagctggacttttcccgggtgtcagaggccttcaggaaggccagcaggccccaggaggccagcatggcggagccgccgttggagacaaaggggagggtgacgccggtgagggggagcaggtccatggccccgaagatgttcagggcggtctgcaccaccatgagtgagcccgcggcgcaggcggcgatggtatagaaagcggagcggcccacccggcaggcccgggcggcaaagagggccagggtgacgatagagaccaccgccagcagggcgatgagcaggccccactcctcgcacagcatgccgaatacgaggtcggtgtccgccgccggcacggtgtgcagccagccctctccggcccccacccccaccaggccgccggaggcggcggccgacatggcccgggtctgctgatagccggtggtggaggcgaactcccaggcgtggccccaggaggcgaagcggcggaagatgtagggcttgaagttgaggaccagcaggccggcaaacagggccccgccgcagatcagggacagggtggcgaagtcgccggagcggaggtaggcgatcaccaggaaggtggcgaagaagatgagggcggtgccgaagtcgctcatcagcgccagacagagcagacataccccggtgagcaccatgaacagccccaggttgcgcctgtggaacagccgctccagagtggcggagccggcaaagatgtagaagatcttggccacctcagagggctgaaaggagagggggcccaggatgatccagttggccgccccaaagcgggtctgtcccagcaccaaggtgacggacagcagggcgatggcagccgcagccatcagccagcgcagccgctgggtgcggctggtgtcccgcagccacacccccagcaccacaagggcggtcagccccagcaggatggcgatgaactgcttcagcacagagccaggggcggaggaggcggtgacggccagggagagggtggagagaaagaaggcgatggtctccatctcgaacccccgggcgccgcagcggcgcaaagccagatagtaggtccacatgacggtggggaggccggggaagaggagaaacaggctgggggagaccgacgcccccgcactgacggccagctggagggcagccagcagctggaacaaagtcagccacagcagggagggccacatgggcagaggggcctcctcctgccgccggcgggagagctgctccccctcctcccgggacagggggaggaagagcaggtccacgccccccacggtgagggtgtcccccacccggatgggggtgcgctgggagacctggacgccgttgacctgggtgccgcccttagagcccaggtccgtgacccaccaggaaccggactcgtcccggagaagggcggcgtgctggcgggagacggtggaaaaattgaggcggatatctgcggaggaggagcggcccaggatattttcccagtggtcgatggggagggagccgccgccgggcaggctgagctgtccccactgctccggggtgtgggggacccgcagcaggccgcggatggcccgcaccagcaccagcagggcgaggatggggaagaggaagcggaccagggcggtgtaccaccagacggcttgggcgtgctctgtcagccaggtgcccaggagttggggaaaggcctggaaggcggagatcgattcagacaaggggacccctcctttcggggacggcagaccggcaggggactgcaagacaagagatcggtgatattgtatcacagggactggagaaagcaagcgggagttaaaggagaaacagcgggcctccggaacgatcccggaggcccgctgttgaaaatgagatacggtcagccctgctcaggggtgcggggaggcttcccactgcccttggagcggccgtcccggcccttgccctggagctggttgtgcatgtccagcatggtctgggcggccaaatcgaagtcgctgacctcctcgtagttgtccaccaagtcgctctgtaccaggtcgctgtaatcctcttcggccttcttctttgggtagacggcgcggagcatgatgggggtgacgatggtggtggcagccaccatgatgaccatgggggccaggaagatggggttcatcattccagtggcgatccccttgttggtaacgatcagggctacctcgccccgggataccatgccaacaccgatgcgcagggactcggcgttggtgtagccgaacagcttggcccccaggccgcagccgatgaccttggtgacgatggccagcgcgatggcgatgacggtgagcaggatgacggtcccatccatggaggagagggtgactttcaggcccacactggcaaaaaagacgggggagaggagcatgtaggagagggtctcacactgggagttgacatagacggcccgggtggtgttggcgatcatcaggccggcgaagaaggcgccgatgatatccgccacaccgaagacctcctccgccacataggcatagaagaagcagaaagccagggagatgacggcgaagcgcttccggttccaggaggcagagttcatccaccgctggatcagcccgtggaggaagtagccagccacgccggtaacaacaaagaaagccacgatcttgatcatcacgatgccaaggctgatgctgctgtcagaggcactggtgatcagggtcagcaggatcagccccagaatatcatcgatcagggcagcacccaagatggcgttgccggaacgggtggacagcttgcccatctccttcagggtctctacactgatggagacggaggtggcggtgaatacggtgcccacgaacatgttctccaggaaggaacccccgtggttgaagacctcggccaggacatagccgcccgccagggggaccagcacgccgatcagggcgatgaaaaaggcggctttgccggattttttcagctcctggatgtcggtctggagtccggcgccgaacatgagcaccaccacgcccagctcggagagcatagcgaggaagtcactgggctggaccaggttgaggatgctgggccccagcagcaggccggccagcagagagcctaccacctggggcatatccacccgtttggtaagcatggcaaagcactttgtgaccagcaggatcagggccacatcaaaaataaaatgatatgattccatggcagattaccttcttgcagacgaaatgatgcgtaactgtggcggctgcggcggacgccctatggggaattaagagaagacatcaatgcccccagacgtccggccgctgggatcaaagaaagagcaaccgtctccgtcagcgtatggatactaccacaaacaaaaaagaaagtccagtgatttgcaccgagaaggtgtacgattttaacagaaactgaacaacaattttgttatgaacgtcaaaagtgagaaaatggaagggaaagaagcaaataaataaatgagagaggagatcgcactagaaatgccgcgcccggggtcacttccgggcgcggcataagacagattttcagaaaaagatcaggcctgggcgaggaagtagtcggtcatcagatcaatggccacgcccagcacctcctcccggggaagaaaagcgtcgttgtgcaaagggtgctcggcctggcagccaatgtggaaatacagagaggggacctgatggctgaagtagtagaaatcctctccgatcaggctggggtggatgtccgtgtggacgtgttcctgtcccaagagccgggccgcatgggtggaaaagcgctggaacagctccggtgagttgcggaggacgccgtatccagcttggatgtccaccttggcctgcccgccgtacagggaggcgatctgctgggggatctcccgaatgcggcggtggaggtagtttcggctctcctcactggtggtccggaccgttccgtccaggacggcccggtcacagaccacattgtagcgcccaaaggtctggaaggagccgatagagacggagacgggctcgaagggattgacctcccgccggagcttctggaccagggcacagtcgatctcggagccgatgacaatggcgtccacccccaggtggggctccgccgcatgggcggcagtgcccagcacctcgatgcggaagcggtcggaggccgccataatggggccgggccgcagctcgatgtcccccaccggcagagagggccacatatgcagaccgtacatctcgtcgatgtgctggtcggtgagaaaaccggcctcagtgacagggcgggcgccgcccaccgggtttgcctcctcggcgggctgaaacaggaccagaatgttgcagttcagccgatccttcacccggttcagctcacaggcgatcccagcggcgatggcggtgtgcatatcgtggccgcaggcgtgcatgactccctcgtggacggaggagaacggagcgccggtatgctcggtcagcggcagggcgtcgatatccgcccgcatgcacagggtcctggcctttcctgcgttgatgcggacaaagccgccgttcagcgcgccgatggggcacagctccagtccgtcccgggccagaaattcccggatgcggcgggtggtctccacctcctggttgctcagctccggatgccggtggatatcccggcggaactccagatagcgggaaggatcagctttcatacacaaccttcttcctgaaaaagatgctggggcaggccccttttgggaggctcagtccacggggcggagcagcgtgtccccgtagagagtgggctgccggtcccggaacatatggatcaggtcccggacctcccgggtcttggtgtagtcgatggagccggtgatgatctcctcctcaccgccgccctccgcgatgatgtcgccccaggggtcgatgatgatggagtggccgcagtaggtccccatagggctggggcccacccggttgcaggccaccacgaacatctggttctcgatggcgcgggcggtcagaagggtgcgccagtggttcaccctgggattgggaaagtcggaggtgaccaccagcacatccgcctttttcagggcgtaggtgcgggccagttcgcagaagcggatatcataacagatcatcatgcccaggcggcccaactcggtgtcatagacctcggtcttgtcaccgttggcgaaggggacatgctcgtccatgtcgctgtacagatgcattttgctgtaatcacccacgatctccccccgccggtcgatgaggaaggtggtgttgcgcatcttgccgtcggcgtggagggtggcgatggagccacccaccacccagacctggtactgccgggccagctcccgcagcaccgtgacagagggaccgttttccggctccacgaagtcctccatgtggtggaacatctcatcagagaaaccggcggaccagtcctcaggcaggacgaccacgtcgggacgggggtccttggccatagcctgggcaaacagctcccggacccgcttgaaattggcctcgggatcgcagaacgcgatgttggtctgaagcagtgcaaagttcgtcatacaaacatctccaatctgatcaaatgccgttcacatggtgtacaaaatggcgcggatgagaacataggcgaaggtgatgacagtgatgacccagccgttggccagcatggccttgatgttcttggagcgggccaggcccatctgtcccaccatatcaacggtgggggtgacgaagaaggtgacctggcagcccaccaggaccaccatgccccagataggcatggcgatattgagggactgtaccatggggaggaacagctcgtggatgatctgcgcctgagccacgccggtgccggagatgccaaagatgcccactgcggcgctgagcatgaggaaggcgacctcgccgcccacatcgatcaggggctgcatgagctggcagaccgcatcgaaggcgccggaggcgctgacatagttgaggaagggctcaaacaggacgaacatgaagaacatccagaacattttggagccgccctggatcatagccgtgagggaggactggaaggacaggccgcccaccaggcctaccacgatagaggccgtcatcatgaccaggatggcgtagctggcgccggcgcccaccaccaggccgtagcccagcataacggccatcaccagcaggaaggccagggtggcgcgcttgcagcgggcatccgggacaaaggcggaagcgtcttcccccgactcctcataggcctccagcgcctcggtcttccgctgggtgcggcaggccatgaagaaggtggagccccagacgatgacggccagagggatgccggcggtgatgaggtactgtccgtaagagagcccggtcaggccggtgatggtgaccaccggggggacgaaggggcctacatacaggccggtggctccggcgccgtggagaatgacgcccagggtggagggggtgagccccacgctggccacaatggggatcaggataggggcgatgatggcgttggagccggccagggtgcccagcagggagaccagcagggtggaggtgatcatggagatcagaatggccatcttcttgcttttcagcttgaagcggttgaccaccatgtacaccaggttatgtgccacttttgtctgggacaggacttccgccagaccagagcccaggacgatgatgaagccgatgagggcacagaaggagcccagggaggcgtagagcgtgtcggcgaagccggtaatggattctccggtgaggatcgcgcccagaatcacgcacagaaggacagagacgttcatgtccttgcccatcatcatcaaaacgatgtagagcagcaagggcaggaagccgaagaggggatgcagcccaaagatcatagtttccatctcctttttttcattcgcggtttccgttgggacaggcatattatattcctgcaccttccggaggccggcttctgccggagggcgcaaaaataccggaagaaaaaggagcggaatcagatggtcagaggtagatgtggtgctccagggcaattttgtcctgcagctccatccgctccagggtctgctgggcgttcagacggcccagggaggtgataaagcagttgcacagggtgatggctcccacgggggagaagttcccgccgttgggggcgatcagcacctcggtggctttcagcgcgatgggggaggtgagcgagtcggtcaaagcgacgatcttgcagcccgcccggtggaagtgggatacgatgtcataggaggagctggtgtaccgggcataggagatgaccagcaggcagtcctccggacggacatcactgagcgcagtgggcaggtcgctggtggaggtggtgagcagatggacgttgtcacacatctgctggagcatgaaggccagatagtaggccgtggcataggaggaacgcatcccggcgatatagatggtccgggcctgatgcaggatctcctgggcgcgggcaaaggaatcccgcagctggggggtgtacagggcctccagcaggccgatgttgttctggatggtccactgaagggagtccggtccggcgtcctcggcaggggtctcccggcggagcagggatttcagctggccgaagggggcccactgcttctggtgctcatagagcccgcgctgaaggtccggatagccctgaaaatccagcctgcgggcaaagcgggtgatggtggccggactgatcccggtccgctggctgagctcattgatggagagaaaggccacctcgtggagattttccagaataaaatcagccagcctccggtggcttttggaaaaagaatcgtagtgggtgcggatctgggtgacaacatcttttgtctgttccatagtacagtttccctctttacgatcataaaatggcggacttggggcggaaaagcacagccccgacagaaccattataggaggaaaccgccagaaaggaaactgtttttcaacattttggcactcagataggcaatcttattttttgatgcggatgagccggctgttggtgcggcagaaacggggagcgcggtcctgcttccccttgaagcggcgcactgcggcgcggtagtcttccagatcccggcggagaaagagcatcagggagccggcgatcagcacaccggcggacaccccgtagaacagggtggaccagagggcggtgtgctccctgtacagaaaacaggtggcggcaaactggaccagaaagacggccatgttgatctgcatgaccatcagggcaccctggatgtgtccacgggctcccaaaagggcgatgcccaccaggacggccccgccggccagcgcaaaggggagggagctccctgtataggagtgggagaccagcccgatcaggcggtccagcactacgatgaccgcccaggaggccatgatgatctgtacggtgcggtgcgcccggcggaaggaggcgtcagactgtctggcgctgcggatcttctgcatcagggagtcagggcggagatcagggtcagggcgcatagggatccctccgttttcagattcagtaactgcattataacaaaatgaaaatatattttcaatatagaaaaagaaatgaaaatataaaaccatttttggagcatctgctgaaaatcaggcgcgctttggccaaacagacctgaaagcggggaggtctgaggaggtgcgttcaggcacgatccggatgaaatgagggaaagcgaaggccgcatcggtttttggccttgatttgaggggctgaatcctctaaaatgggaatatacagaacacagcggtccggcggggcagtgacgccccgctgtttttgggaccggaaggggaaccatgagaaagctggtcattggaattttagcccatgtggatgcggggaagaccaccttatccgaggggatgctgtacacctgcggcacactgaagcggctggggcgggtggaccaccaggacgcctttctggacacggaggcgctggagcgggagcggggcatcaccattttttccaagcaggcggtgctgccgctgcccggtgtagaggtcaccctgctggacaccccgggccatgtggacttctccagcgagatggagcgtactctccaggtgctggactgtgccatcctggtcatcagcgggacggacggggtgcaggggcacacccggaccctgtggcggctgctggagcgctatcacatccccaccctcctctttgtcaacaagatggacttggcgggggcggaccgggcggttctgatggcagagctccagaggctggacagcggctgcgtggacttcggccaggagggacccgggctccaggagagcgtggccatgtgcgacgagggaacgctggagcgatatctggagcgggggcaggtggagccggaggagatccgggccctggtggagaggcgcaggctgtttccctgctggttcggctccgccctgaagctggagggggtggcggagttcctggagggggtggagcagtatgccccccggaagtgctgtcccccggagttcggggcccgggtgtacaaggtcgcccgggacgcccaaggggtccggctgacctacctgaagatcaccgggggcagcctgcgggtgaaaacgcccctgaccggcggggagggggagatgcgctgggaagaaaaagcggaccagatccgaatctactccggggccaaataccgggccgtggaggaggcggaggcggggaccgtctgcgctgtaacagggctgagccgcaccaggccgggagaggggctgggctttgaggcggcgggacagcccccggtgctggagccggtgctcacctaccggctggagctgccggaggggtgcgatccccacgcggctctccggcagctgcgggagctggaggaggaggacccccagctccacatcctgtgggacgagcgcctgcgggagatccatatccagctcatgggggaggtgcagctggagatcctccgccaggtcatcgcccagcggttcggcatggaggtctccttcggcgcggggagcatcgtctaccgggagaccatcgccgcgccggtggagggagtgggccactttgagcccctgcgccactacgccgaggtccacctgctgctggagcccggggagcgtggcagcggcctgcgggtagggaccgcctgctccaccgaccagctggacctgaactggcagcggttgatcctcacccacctgctggagcgtgagcacctgggggtgctcactggctcccccatcacagatctgaggatcacactggtggccggccgggcccacgagaagcataccgaggggggcgacttccgccaggccacctaccgggcggtgcggcaggggctgatgcaggcggagagcatcctgctggagccttggtacgacttccggctggagctgcccgcctcctgcctggggcgggccctgtccgacatccagcggatggggggcgaggcggcggccccagagagccagggggaggaggcagtgctcaccggcggggccccggtggaggggctgcgggactacgggactcaggtggccgcctataccaggggccagggccggttgttctgcacccctgggggctaccgaccctgcggagatcaggcgggcgtggtatccgccctgggctatgacccggagcgggacacggacaaccctgcggactcggtgttctgttcccacggcgccggcgttacagtgaagtgggaccaggtgcgcgcccacatgcatgtggacagcggcctgcgcctgggcggggaggaggcgcctcctccagagacgcctgtccgtccggcggagcgggggccggcgggctcactggagcaggacaaggagctgatggccatcttcgagcgcacctacggcaaggtggagcagagggccttccagccccagaagaagcccgcccgcaccagcctggatggggagaagtacagcatccggacacagaagcaggggccggagtaccttctggtggatggatacaatgtgatctttgcatgggaggagctggagcggctggcccgccaggatgtggccgccgcccggggggccctggaggatatcctctccaactatcagggcttccgcaggtgcgtggtcatcctggtctttgacgcctacaaggtaaaggggaacccgggctcggtggagcggcggaacgggatctacgtggtgtacaccaaggaggcagagacagcggacgcctatatcgagaagaccacctatgagatcgcccgggagcaccgggtgcgggtggtcacctccgacggggcggagcagctcatcatcctgggccacggggccctgcgccttccagctgcctccttccgccgggaggtggaggaggcggagggggagatctccgccatcctggcccggcacaaccggggggagcgttcccggccggtgaaggaggcgctggagcgggccgcggcgaaggagcggagcgggcccgggagcggcaggaagaggtgaccgccccgccaaagcagaaggcgggaccggccgggcgtccccggagcagggggaggcacaaccggggctggaccggtgtatatgatatttgagaccgcccgggagctgtatcccgggcggttttttctgcctttgcaggaaaaagggagaggaaaatgaaaattaaaaaagaagaaaagcgggcggagaggacacaattgtgaaaactcacaattgacttttttccaaggcttgttagaatatcactaaattattttaattaaataatttgaactaaaattcgacaaggagtgtttttattatgtttgagaaggtcaaagaggtcattctggataccctgagctgtgagcccgagcagatcaccatggaagccagcctggtggacgacctggaggccgattctctggacgccgtggagctgaatctggcgctgaacgacgtgctgggcttctccctcaccgacgaggagctgaagagcatcgtcactgtgggcgatatcgtccgtctgctggaggagcatcagtaagccatggatctgaatgagatcaaggctctgatggaccggttcgacacctccgcctgtaccgtgctggagctggaggagggcaacctgcgcctgcgcctggagaaggggaccgcccccgtttcggttgccccggagatccaggccgccccggcggcccctggagcggctgcgccccagcccgctccggcggaggaggggcagaccctgaacgcccccctggtgggcaccttctacgccgcccccgccccgggggaggccccctttgtcaaagcgggcgaccaggtgcggaagggacagaccgtctgtgtgctggaagccatgaagatgatgagcgaggtccccgctccggcggactgcatcattgaggaagtgctggtgaaggacggagagctggtgggctttgacgcccccatgttccgcatccgggaggtctgaaatgttccggagggttttgatcgccaaccggggcgagatcgcggtgcgaatcatccgggcctgccgggagctggagatcgagacagtggcggtgtactccgtcgccgaccgggacgccctccatgtccagttggccacccgggcggtgtgcatcggtccggcccgggcagcggaaagctatctgaaccaggccgccatcctgacggcggcggtagagacaggctgtgacgctgtccatcccggatacggcttcctctctgaaaatccggactttgccgacctgtgcgccaagtgcgggctgaagtttatcggtccctccggcgacgtgatccggcagatggggagcaaggcggcggccaaggcgctgatgcgccgctccggcgtgcccgtggtcccgggctccgagggggctgtggacctggaggaggcccgccgggtggcggacgaggtgggctaccccgtgctggtgaaggcctctgccggcggcggaggccgcgggatgcgccgggtggaccggccggaggacctgccggccctgttccaggccgcccagtctgaggcagtggcctgcttcggcaacggggagctgtatgtggagaagctgatcctccacccccgccacatcgagtttcagatcctggccgactcccagggcaatgtgatccatctgggggagcgggactgctccatccagcggaagaatcagaagctgatcgaggagtccccctcccgggccctcaccccccagctgcgggaggagatgggccaggccgccgtccgggcggcccgggccgcccattacgagagcgcgggtaccatcgaattcgtgctggatgaggacgggcggttctactttattgagatgaacacccgcatccaggtggagcacccggtgaccgagttcgtcacggggctggacctggtgcgggaacagctgcgcatcgcggcgggcctgcccctgagcgtggggcaggaggaggtccggctgtccggctgtgccatggagtgccgcatcaacgcggaggaccccagggagggctttcggcccagcccgggacgggtggaatttcttcatctccccggcgggcccggggtgcgggtggacaccgccctgttcggcggctaccagatgccgccctactatgactccctgtgcgccaaggtggtggtgtgggcccccacccggctggaggcggtgcgccggatgcgccgggcgctggaggagctgatgatccaggggatggtgaccaccgcagaactgtgccatctgatcctctatcagcccgactttgtaaaggggcagtaccacacgggattcttggaagaaaatctggagaccctgatggcctgggactgcgggacggaggggtgagtcccgtccccgccggatggtgagataggaaccttttcagccggaggacccggttgaacggcgcggagcggagggagaggtccctccgctccggcctgtgcgatggaaggagcgctatggaagagatctttgcccgccggaaggcccggctgatggagctgcgggcccggcggaagggggaggacggcgagcccaaaaggctggcggcccggcctgtgttcgataagtgccccagctgcggggcggtggtgcccaagacggaactgtcccacagcctgtatgtctgtacgaagtgcggataccaccacaccatcggggcctacctgcggctggccatgctgctggactccaagagcttccgggagctggaccaggacctggtggcccccaatgtgctgggtttccccggatatgaggagaagctggagcgccagcgggataagactggcctgatggaggcggtggtcaccgcccggggccgggtggagggccgcagcgtggccgccgccgccctggacagccgcttctttatgggcagcatgggagcggccgtgggggagaaggtgacacgctgcgtggaatatgcccagcggaacaggctgcccctcatcattttctccgccagcggcggggcccggatgcaggaggggatcctctccctgatgcagatggccaagacctccgccgccatccagcgcttccgggaggcgggcgggctgtacatctcctttctgacccaccccaccaccggcggggtcaccgcttccttcgcctccctgggggacatcaccctggcggagccgggggccctcatcggctttgccggcccccgggtcatcgagcagaccatcggacagactctgccggaggggttccagcgctcggagtacctggaggagcacggctttgtagaccggatcgtcccccggggcgagatgcgggccaccatctccaaactgctgcgcctgcacgagaaaggagggacgttccgtggctgagatcctgaccgcagcccagcgggtggtgctggcccggcatattgcccggcccgggacggcggactttattgctgccctgtttaccgacttttttgagcagaaaggggaccggcagaaccgggaggaccccagcatcctggggggcatcgccctctacaaggggcaccctgtgacggtgatcggacaccggaagggcaagactctggaggaaaatgtggcctacaacttcggtatgccggggccggagggataccgcaaggcccagaggctgatggaccaggcggagaaattcaagcgcccggtcatcacctttgtggacacgccgggggcttatccagggctggaggccgaggcccgggggcagggcgaggccatcgcctccaccatcgcccggatgagctgcctcaccgtcccggtggtcactgtggtcatcggggaggggggtagcggcggcgcgctggcgctggccgtggccaaccgggtgctgatgctggagaacgcggtgtactccatcctctcccccgaggggttcgcctccatcctgtggaaggacgccggccgcagcggggaggcggcggaactgatgcgcatgactgccgccgacctgctggagctgggggtggcggatgaggtgatccccgagccggagggcggggcccacagtgacccccaggaggtgtttgaggcggtggaccgcagcctgtccgccgccctggcccgggtggtcaaagagggcagctttgccgcccgccggcaggagaaatttcgcagaatggggagcgccgccccctggaaggagaatccatgaacggactgagcattttgggcactggccgcagcctgcccgaccatatcgtgaccaacgacgacctggcccggcgggtggagaccagcaacgactggatcgtcagccgcaccggcatccgggagcggcgcttcgcccagggggagaccctgacccagctggccgtagccgccgcccggcgggccatggagcgggcgggggtcggcccccaggacatcggtctgtgcctgatggccactgtcacgccggactggatcaccccctcccaggcgtgcctgctccaccaggagctgggcctgccggaggactgtcccgcttttgacctgagcgccggctgcaccggcttcctctacgccatggagacagcggcggccatgctgccccggatggcccggccctgcgctctgctggtgggcggcgagctgctcagccgcattaccgatatggatgaccgctccacctgcatcctcttcggagacggagcgggtgccgcagtggtcaaaagcacggagggggccccctggcacgccctgctgggcacccggggcaaccgggaggccctgtgggcggcgggcccgggcaaccacccggcctacctccacatgaacggccaggaagtctttcaatttgccctcaagactgtcccggagctggcccggtccctgctggacaaggccgggatggacagggaccagatcgactggtatgtgctccaccaggccaaccaccgcatcctggagggggtggctaagcggatgaaggtccccctggagcggttctatgagaacatcggccggtacggcaacacctcggccgccaccatccccattgcgctggacgagatggcggagcaggagctgctgcggccgggacagtggatcatgtgcctgggcttcggcgccgggctgacctggggcggagcaatgttccggtggtgaggagcgccgggcgctctttccgctggggacgtggggatgacaaacaaactgcctcgaggggcggatgcgggaggaaaccatgaaattgaatgagcttttggggacggagttcccctttatccagggcggcatggccaacattgccaccggtgaatttgccgccgccgtctccaacgctggggccctgggcctgatcggcgcgggcggcatgacaccggacagcctgcgggagaacatccgccggtgccgagaactgaccgacaggcccttcggcgtcaatgtgatgctgatgcacccccaggtggaagagatggtccgggtggtggcggaggagcgggtgatggtggtcaccaccggcgcgggcaaccccggcgcctatatccctgtctggaaggagtacggcgccaaagtgctccccgtggtccccgcggtggcggtggctaaggtggcggagcgggccggcgcagacgcggtcatcgccgagggcaccgagtccggcggacacgtgggtgagctgaccaccatggccttggttccccaggtgtgcgacgccgtggatctgcccgtagtggccgccggcggcatcgccgacggccggcagctgctggccgcctatgccctgggggcctgcggcgcccaagtgggcacctgcctgctggtcagccaggagtgccccattcatgaaaactataagcaggccatcctgaaggccaaggacagcggcaccatcgtcaccggccggatcgccggcaccccggtacgcatcctgaagaatcagatggcccgcacctatgtctccaaagagcgggccggcgccaccatgatggagctcgagcagtacaccctgggcagcctgcgccgggctgtctttgacggggacaccaaaacgggaagcctgatggccggacaggtggccgggatgctccacgagatcaagcccctgcggcagatcttcgaggagctctccgcgggctgcgaccgccgcctggcggagttgagaggataagaatggaaatacgaggacatcacctctccattcccgttctccagggcggcatgggggtgggcgtctccctgggcggcctggcgggcgcggtggccgcctgcggcggcatgggcaccatcagcaccgcggacgcgggctatcaggagccggacttccccaccgaccccgccggtgccaacctgcgggccctgcgccgggagatcggcagagcgaaggagctggcccggggggctgggatggtggcggtcaatgccatggtggccacccggcagtttgccgatgcggtccgcaccgcagtggctgccggggtggacgcggtagtctgcggtgcgggcctgcccctggagctgcccgcgctgacccaggggaagacagccatcgcccccatcgtgtccagcccccgggcagcccggctgctccttaagacctgggacagaaagtaccagaccaccgccgacttcctggtgctggaggggagcagggcgggggggcacctgggctttggggaggaggcactgaaggaggggacttgtccctccttggaggacctgctccccggtgtgctggcggagacggccccctacgcggaaaaatacgggcaccccatcccggtctttcccgcaggcgggatctggagcggggcggacatggcccggctcacccggctgggggcggcggggatccagatggccacccgcttcattgccacctgggagtgcgacgcctcccaaggctataaggacgtgctgctggaggccggggaggaggacctggccatcatccacagcccggtggggatgccggggcgcgcggtgcgcaccccgctgatccgccggctggaggcgggggaacggctggaaccccagtggtgcgcccagtgtatgcagggctgccgtccttcggagatccccttctgcattacccacgcactgatccaggcggtgaagggcaaccgggaggagggcctgtttttcagcggggccagcgtgggcctgctggaccggatgtgctccgtccgggagctgatggaggagctgacaagagaatggagggcattggcatgaaattggcctttttatatgcggggcagggcacccagcacccgggaatggggcgggacctgtacgagacttatcccgccttccggcaggtgctggacagcgcccagctggactttgacctgaaagagctgtgcttcgagggaccggaggagaaactgtcccagacccagtacacccagccctgcatggtggcctttgccgccggggtgacggcggtgctgcgggagaaggggatcatcccggaggtggccgccggcctgagcctgggcgagtactccgccctccaggccgccggggtgttcgactccaagacggcggtggagctggttgccttccgagggaaagccatggcccaggcggtgcaggaccggccctgcggcatggccgcggtgctgatgctgggccgggagcagctggcggagtgctgccgtcaggccggggaggccggtgtggtggagatcgccaactacaactgccccacccagctggtcatcgccggggacgccgccgccgtggagaaggcgggtgagctggccctccaggcgggggccaagcgggtggtgccgctgaaggtgagcggccccttccacacctccctgatggcgcccgcgggggaggctttggcggaaaagttccgcagcgtcgcctttggggagatgagcttcccggtgctgttcaactgcaagggcggtcccatggaggcgggagagaccatcccggagctgctggtgcgccaggttcagagcagcgtctatctggaggacaccatccgcgccatggcggggatgggcgtggacaccatcgtggagatcgggccgggcaaggctctgtccgcatttgtgaaaaagacggaaaagggcatcaagacctacgcggtggagacggtggaggacatcgagaagctgtgtgaggcgctgaaaggagagcaggcatgagcttgaagggaaaagtggccctggtcaccggcgggagccgggggatcggccgggcggtctgtctggagctggcccgccagggggcggacgtggcggtgaactacgccgggaacgaggctgcggcccaggagacggcccaggcgtgccgggagctgggcgtgcgggcagtggtcctccgggccgatgtggctgacgctgcggcctgcgacgcaatggtggctcaggtgctggagcagctgggccggctggacatcctggtgaacaacgcaggcatcacccgggacggcctgatgctgcggatgcccgaggcagactgggacgcggtgctggacaccaacctaaagggggccttccactgtatgcgggccgcctataagaccatgatgcgccagaagagcggccgggtagtcaacatcagcagcgtagtgggcctgcggggcaacgccggccagaccaactactccgccagcaaggcgggtctcattggtctgtccaagtccctggccaaggagctggccacccggaacgtcaccgtcaacgtggtggcccctggctttatcaccaccgatatgaccgatgccctgccggagggggcgcgggaggccctgctgtccactatccccatgaagcggctgggcgcggcggaggacgtggcccgggcggtggccttctttgctggcgagggcgccggctatgtcacgggccaggtgctgtgcgtggacggaggaatggcggtttgagccgcagaaaggaaactgctatggaaaaaagacgagtagttatcaccggcctgggcgcggtcacccccctgggccataccgcccgggaaacctgggaggcggccaaagcgggtgtgtgcggtatcgcccccatcaccctctatgaccactccgcccagaaggtgtccctggccggcgaggtgaaggagttcgacccctccggcgtgctggagaagaaggagatccggcggatggaccgcttcgcccagtttgccgtgacggcggccgcggaggccatggcccacagcggcctggacctggagcgggaggacagggcccggatcggcgtcgccctgtccagcggcatcggcggcatcggcaccctccagacctcctgcgagactgggcagagccggggctttgaccgggtctcccccttcttcatccccatggtgatcaccaacctggcggccggccatatcgccatccgcttcggactgcacggcatgtgcatctgcccggtggcggcctgcgccggcggcgccaatgcggtgggtgacgctttccgccacatccgggacggctacgccgaggtgatggtggccggcggagccgaggcctccatcacgcccctggccatgggcggattcacctccatgagcgccctgaccgacgcctccgatcccagccgtgcctccatcccctttgacaaggagcgcagcggcttcgtcatgggcgagggggccgcggtgctgatcctggaggagctggagcacgccagggcccgaggggcccagatcctgggcgagatcaccggctacggcgccacctgcgacgcctaccacatcaccgcccccgacccggagggcgcctggagcgccgcctgcatggagcaggccctggccgatgccggcctggccccggaggcggtggactacatcaacgcccacggaacctccacccccctcaacgacagcggggagaccgccgccatccgccgggtgttcggcgcccacgcggaccggctgatggtcagctccactaagtccatgaccggccacctgctgggagccagcggcgcggtggaggctgccctgtgtgtgttggccctgaaggatgggtttgtccccgccaccatcaactatcaggtcccggacccggcctgtgacctggacatcgtgcccaacgggggccgggaggcggacatccgctgcgccatatccaattctctgggcttcggcgggcacaacgcctgcctggtgttccagaagtgggagggctgagacatggagtttgacgccaatcagatccaggagatcctgccccaccgcccgccctttctgctggtggaccgcatcaccggcggagagcccggtgtctgggcccagggcatcaaatgcgtcactgtgaacgagcccttcttcgcgggccactttccggggtatcacgtgatgcccggagtgctcattatggaagcgctggcccaggtgggggctgtggctatcctgtccctgccggagaacaaggggaagctggccttcttcggggggatcaagaacgcccggttcaagcgccaggtggtgcccggagacgtgctggagctgcgctgtgagctgacccgccaggtgggcagcgtgggcttcggcaaggcggaggcccgggtgaacggcaagctggcggcccagggagaattgaccttcgctgttgcacagccgggcgatccctgataaaatggactccagcagagaaaacaggggaaaagaggaggggtccatcttgctggagaaggattttaacgaggtgtacaccaaattcaagctgcatttttaccgggcggtgttcgggcgtttcaagcggcgggaggccacgctgaccacagtggagaccttctgcatggagattatcctggccctgggggagcccacggtgaacgagttttctaatttcgtgggcatctctccccccaacgcggcctacaagatcaacagcctggtccagaaggggtatgtagaaaagcggcagtcccaggaggataagcgggagtaccacctggtggcgacccagaagtatctggattattacaacatcagctatcattatctcaacactgtcatgagccgtatccgggcccgcttttccccggaggacgtggccaagctggaggggatgctggagatcatctcccgggagctgatgcccgagatccccctgggggaccagatccatcaagcagaacaggcataaaaaacccggcgatcacaggatcgccgggtttttatccatataaaactcgatcagtcagtgacgtagggcagcagggcgacctgacgggcgcgcttgatggcctcagtcagctggcgctgatgcatggcgcaggtgccggtggtgcggcggggcaggatcttggcccgctcggagatataacggcgcagcttggcggcgtccttatagtcgatgcactccaccttgtccacgcagaaggcgcagaccttgcggcgcttgcggccgcgagggccccggttatcacgatccataggcatgagagaaacctccttttcagaccatatcggtcaaagtatcacgggtgtcccctctcagaagggcagctccccgtcgtcatcagaaagctcggcaaactggtcgcccatgtcgggggcgccgaagccggagggggcgggagaacgcccgccggaaggggcggaatagcccccgctgtacgggccggcggattccgcgtcccgcttggagtcaccgaaatagacgttatcggcaaccacctcggcactgcggcgcttgttgccgtccttgtccgtccagtcgcggatctggaggcggccctccaccacggccatgcggcccttggtgaagtaccggctgacaaactcgccggtctgccgccaggcaaccacatcaatgaaatcggtggtgcggtcgccggtggccttgtccttaaagtcccggtccactgccagagagaaggaggccacagccgtcccggtctgggtgtgccggagctcggggtcacgggtcagacgacccatgaggatgatcttgttgagcatatgcccgcctccctcactggtccttgcagacgatcagggaacgcatcacgctgtcgttgatccggaacagacggtccagctcgtggggaatggcggcggcggcattgaaagtcatcaggacgtagtagccctcgttcaggtcgttgatgggataagccagacggcgcttgccccactgatcgatctcagagacggtcccgttggcctccaccacacccttgaacttctccaccagagcggtgatctcctcctcgcccagggcggggtccaggatgtagagcgcctcgtagttcgcgttgatttttgccatagttcttgcacctccttatggacatatggcccccggaagatccgggagcaaggatatctcctgtctcatcagaaagacaggcttaattattatataggaaatccccgggatgtcaagagaaaatcccggggatctggcaaaaattttatttcagaggcaggaaaaacacctgggcgggactcagtagcggcggactaccgccaccaccttgcccaggatctcggcccggtcgccgtcgatgggggtatagtcgtcgttggccggcatgagccacacatggccgtccttccggcgataggtcttgacggtggcctcatcctcaaacagggccaccacgatctcaccgctgtggacctcctgctggcggtggaccaccactaagtccccgggcaggatgccggcgtccagcatagattccccccgcacccgcagggcgaagtgctccccggacaggccctgggtatcaaaggtgaggtagtcctcaatgcactcctccgccaggatgggggagccggcagccacactgcccaccaccgggatctgatcggcgtgggggtcctgctcctccgccaccggccggccggtgccggacagggtgatggcccgggtcttgccctctgccttgatgatgacgccagcctcctccagccccttcagatggaaatggacggtggagggggacttgagacccacagccgcgccgatctcacggacagaagggggatagccatgttccgcggaaaaggtctggatgtagtcgtagatcttctgctgcttcgcagtgagtttctccatggtctgactcctttccacagatgggcgtcgtcggttcatttaataaaatcatagcacaggaaagcaaaaaagtcaaacgaatgttccaaataagctttctgaaaatgaaataaatggaggatggggagcggtggggcctgtatcccgtgcagggccgatggggggactacgccctacacggggacgcagcctccgcagaggggagggccggtccatttatgaacaatttttgaaacatacagggctccccttgactttttatggccgaatgctaaaataatcagcatgttaattattaagccgttaatgattgaaaaatattccgtaagggggcggagatatgtccagtctgaacatggatctgggtgtgttggaacaccagatgcatcaggcgcatcggaatgcggtgcaggcggaattgagcgcggcgggactgcaggaagtgggccatccccttctgctgtgcatcctgcgcagcgcgggggagcgctgcccggacgggcaggcccagagggagctggcggagctgctgaacatttcgccgcccgcagtggcagcatccctgaaatccctggagaaaaaggggtatattcaccgggagccggagcctggggacgcccggaggaaccgggtgcggctgaccgccaagggggagaaggcggtggacgactgcttcgcctgcctgcagcgggtgacccgcagaatgttcaccggctttaccaccgaggagcaggcagtgatgcggggcttctatctgcggatgctggagaacctccaggctcccctggccggcgtgcgggcttctccccttgcctgagggcgggaacgatgaagcggcgggcgcgcggctggatttctcgtcattttgaccataagcttcttaaaaaaccaagaaaggaagatgatcgatttgcttcagttgtttctgacccacctgcagggctacaagcggcaggcggtctggtctcccatcctcatcgtggtggaggtcatctgtgagctgctgctgcccctggtcatggcagagatcgtggatacggccatcccagccggcgacgagacttacatttttcagctgggtgcggtgatgctggtgctggcgggcgtggccatgctgtgcggtgtgctggcggccaagtattctgcctttgccagccagggctttggcgccaatctgcgccagtgcctcttcgacaaggtgcaggagttctcctttgcggacattgaccgtttctcctccgcctccctcatcacccgtatgaccaacgatgtcaatgccatgaccatgatgctggccatgggtctgcggatgctggtacgggctccagtgatgctggtggccgccctgtgtatcagcttctatctgaacgccaggctggcactggtgctggtggtggtcattcctctgatggtgctggtgatcggcattctgatgaaggtgtgcaccaagctctttgagaccatgcagaccaagatcgacaacctgaacaatacgctccaggagaatctggtggccatccgagtggtgaaggcctttgtccgggagggctacgagcgcatcaagttcaagaagtccaacgatgagctgatggacgccgctctggcagtgggcctgcggatcattgcgatcatgccggtgatgatgctggccctcaacggggccacagtggcggtgctctacttcggcggaggcatggtcatggggggcacctttgaactgggcgacctccaggccttcatcaactacatcgtgcagatcctcatgagcgtgatgatggtggccatgtccctgctccagctctcccgggctcaggcctgcgcccaccgcatcaaggaggtgctggagacagagccctctgtggagaacaagccggagggggagatctgccgggcggccctccccggggaggcggcggacggaacggaccacgtcctgcccgcccccaggggcgaggtggagttccgggacgtctccttcaaatatgtggcctcgggcagcggggacgacgtgctctcccacatcagcttccatgtaaggccggggcagttcgtggccatcgtgggcgggaccggcacgggcaaatccactctggtcaacctgatcccccggttctacgatgtcaccggcggccaggtgctgctggacggggtggatgtgcgggactaccccctggaggagctccggggccgcatcggcatggtgctccagaccaacatcctcttttccggcaccattcgggagaacctgctgtggggcaacccggaggccacagaggaggagatgatccaggcggccaaggacgcccaggcctatgacttcatcatgtcgttccccgacggcttcgacaccggcctgtcccagggcggcgtcaacgtgtctggcggccagaagcagcgactgtgcatcgcccgggccatgctccgcaagccggcggtgctcatcctggacgactccacctctgccgtggactcagccacagaggcggccattcgggagtccttcgccgccaacctgaaggaaaccactgtcatcatcattgcccagcgcatctcctcggtgcagtacgccgatgagatcctcattctggaggatgaccacattgcggcccggggcacccatgaggagctgctggctaccagtcccatctatcaggagatctatcagtctcagcaggaaggagttggtgaataatgccgggacccaatcgcgccccccgggggggctatcagaagcccaaggatctgggcaagaccatatccaggctgctgggttatctcacccgcagcaagctgcccctgatggccgtgttcggatgcctgctgatctcggtgttcaccaacatcggcggctcctacatgatgcggggcatcatcaacgacttcatctggtcgggctgcaccgacttcgccggcctgggccgggctatcctggtcctggtaggcatctacctcatcggctgcgcggccacctacggacagtccgccgtcatggtgcggctggcccagcgggggatcaaccggctgcgcaaggacctgttcgacaaattgcaggacctgccgctttcctactttgacaagcacccccacggcgagttgatgagccgcttcaccaacgacgcggacaacgtgcagctggccctggagcagagcgtggtctccatgtgctccagctgcctgatgttcgtgggcctggtggccatgatgcttttcatcaactggaagctgttcctggtcaccgccctggtgctggcgctcaccatggtgctgttcaacaagctgggcgggcgcagccgccgcttctatcagaagcagcaggcagccctgggcgacgtgaacggcgacatccaggagatcatcgaggggctgaaggtggtcaaggccttcacccacgaggagcaggccaaggatcagttccgcaagctcaatgagacctaccgggacgcggcacagaaggccaacttctactccaccatgattatgcccgtgtcgggcaacctgatgaacatcagctacgccctcaccgccgcattcggcggactgctgtctgtcatccagggctttgacctgggcggcctggtggtctatctcaactactccaagcaggtgggccagcccctgaaccagatctcccagcagatgaccaccctcctctccgccctggcgggcgccgagcggatctttgaggtgatggacacccagcccgaggtggacgaggggaccgtcaccctggtgggggcggagaaggacgccaacggcaccctgtccgtctttgacggcgcaggccggccccgtgtctgggcctggaagactccaaggaccgcggccatggcgctggtccccgtgctggtgggagcaaaggatgccctcaccgagctgggccaggcggagcggaccgagagcggcggcctgaagctgctgcctcccagcgtggactcctcccagggcatctgggtggaggtggcttctgacggcaggctcaccgaagtgaccgacctggccgccctggccggccacggctgggcctggaagtaccaggaccacacgggcaagccctccctccacctgatccggggcaccgtgcgcaacgtgcccggggaggactactacctcaccgagctgaagggggccgtccggttcagccatgtggacttctcctatgtgcccggcaaacgcatcctgaaagatgtgaccgtctacgccaacccgggccagaagatcgccttcgtaggctccaccggcgcgggcaagaccaccatcaccaacctgatcaaccgcttctatgagattgagggaggactcatcacctatgacggcatcgatgtgaaggccatccgcaaggacgacctgcgccgctccctgggggcggtgctccaggacacccacctgttcaccggcaccatcatggacaacatccgctacggacggctggatgccactgacgaggagtgcgtcgccgccgctaagagcgccaatgcccactccttcatccgccgcctgccggacggctaccagaccatggtcaccggggacggggcgaacctgtcccagggccagcgccagctgctggccattgcccgggcggccgtggccgatcccccggtgatgatcctggacgaggccacctcctccatcgacacccgcaccgaacggcacatcgagcaggggatggatgccctgatggagggccgcaccgtctttgtcatcgcccaccgcctgtccacggtccgcaactccaactgcatcgtggtcatcgagcatggcgagatccaggagaagggcgatcaccaggagctgctggaccagaagggacgctactatcaactctacaccggtcagttccagctgtcctgacccccggacgtgggcggaaggcaccggagacaggaggagcgccatgtcgcagatcacaaagcgggccctggcctctgcgctgaaggagctgctggagcacaagccgctgaataagatcaccatcgccgacatcaccgagcagtgcggggtgaaccgccagaccttttactaccactttcaggatatctacgccctgctggagtggatctacaccaccgacgcccagcgcctgctggagggaaagcgggacggggacacctggcagcaggggttcctccaggtcctggagtacatccgggacaaccgggccctggtccgcaatacctaccactccgtcagccgggagctgctggagggctacctgtaccgggtgacctaccagctgatgcgggacgtagtggaggagagggcggcggggacccaggtcccggaggaggaccgggccttcctggcccacttctacaagtacgcctttgtggggctgacggtggagtggatgcaggggggcatgaaggaggagcccgccaggctggtgagccgggtcaataccgtgatggagggaaatatcgccgcggccctggagcgcatggcccggcggaaagagccctgagatccagacaaagggggcccgctgtcgcaatttgcgacagcgggccccctctatccattggcaggcagggccggg

SEQ ID NO: 13504 - DNA, 6423 bp, Unknown
  gut microbiota DNA sequence
gccagttgatcccctccgctctggcgcacctgccatataaacagcatcccgcccggctgatagccgggcgggatgctgtttatacgccggagctttggcccccgacctgtgccatcctatttcttcctcacaaagcacctgcagatcagccagttgcacaagcagaacatgcctacggctgccatcatcggagatatctctccaatccccagcgtttccagcagtggaaccaacaccaggacaggcgtgtatgccagcaggagcagagcgatcatcccgccctccggcaccagcctcagcagggccgctgccgccagtgccccgcaggcggagagccagtacctgcccacgaatttggacagctccagccgtccgacgcagatcatgaatccgtcggcggacaacacgacgcacagataagccgcactcaggacataggaccatagtgggaagctgtgtccataacccttgtctatcccgtaaaacaagttggcaatgctgagacacagctggagggggatcaacagcatcaaaagcacgcacagcccctggtccagcttccaaagcctcttctcccccaccatgtccgcctccctgcaccatttttcttttagtataacatgccccggcagaaaatcaatgcccgcctgtttgtactccctattgggtaaaacattcaaatgctgtaagagttctgtaaggtttgtgtcagaaagtcgtaaggcccccttcacactcctttcataaaggcacgatatcctgttttccagaaaggaagtgtttgtatgaaattgaggaaacagatggcggcggcagtactagctgccgccgccctgtctctgagtctgccgctcagtcaggcccaggacaccccttctccagatcacatgctgggtctgaccgcagagcagcggatggaggactacaagtatctctggtctgttctggccgacagctatccctgctgggggattttagatcgggaaggggtggatgtggaagggatctacaccagctaccgggacatggtggccgaaagcgacagcgatcagaccttttatcaagcggtttacagcaccctgttcctgctggggaacaacgggcatctgtccattgtggagcccgctgactacttcagtctcctcccatccgccaggctctaccggcggagcgggcagacggcctgggccgacattctcgagcggaaagagacccgcgaaaagtaccgctccctcctggccctggaccgcgccattaactcctcaagtgaggaagaggagccggccctggagacgccggcccccgctgctggcggcgtgatccccctcctgttgccggagagtggggtgggctatgtgaaaatcgacagttttcccgccgagtacgaggcggaccgtgccatcctgtctgacttctaccggcagtgtggggactgcaccgacctgatctttgatctgacggacaacagcggcgggagcgaggcttactgggaggagctgttggtcgccccccacattgatgagcccctgtccagcgagcacctggccctggtccgccacagccgcaacaacgccccttatttggatcaggtctttcccgccgagtgtctcctccccctgaaccagctccccagtctgcctcatcttgagccgggggacctggatctagccacccactttgtccgagtctgccacagggtggagccggctgatcagcccagccccttccggggccgcatctgggtcctggcagacgagtccgtctactccgcctccgaatccttcgccctcttctgccaacagaccggttttgccacgctggtgggcagtgccaccagcggagatggcatcgggacagacccggtctttctccagctgcccaacagcgggatcttggtccagtacacccctgtattcggcctcaatcccgacgggagcagcaacgaggagctgggcaccctcccagacctcccctctcccccaggcgagcctcctcttatcaccgctctccgggccatctctcaggcctaagccatctgtccccgtccgcctcccgggcggggacatgattgccctggcctctccgccatcttcatacaaaacacatcttttcttcaatcgctctccacattgcaccggtatcctgacatggaacccaagacgaaaggatgttgacccatgcaaatccaaatccaagatctctctatgacctatcccagcgggaagcaggccctccagcgactggacctggacctgaccagccccagcctggtggggcttctgggccccaacggggcgggcaagtccaccctgatgaagctgctggtggccgccctcctgcccacccagggctccatcctggtggacgggcgcccgctggaccgatcccagcgggcgctcaaagcccgtctgggctatctcccccagtccttcggcctgtatgacgagctcaccgtctatcagttcctggactacatggctgccctgaaggggctgaggaacagccgctccgccatcgaccaggtcatccgggccgtcaatctggaggagaagcgccgggccagaatccgcactctctccggaggccagcgccagcgggtgggaatcgcccaggctctgctgggagacccggagttcctcatctttgacgagcccaccgtgggcctggacccggaggagcgcatccacttccgcaacctcttttcccagacagcccaggaccggctggtgctgctgtccacccatatcattgaggatgtgcagtcggtctgcggccagctggtcgttatggaccagggcagggtcctgttcaccggcactccggaagccctgatccagtccgccgctggacacgtgggggtgttctgggaacgggaggcggcccaggaggcggggctgcacattacggcccgggtgaacaccagccagggcatccgctaccgggcggtggccgatgtcctcccccgcttcgctcagcccgcagaacctaccctggaggacgcctacctctacctcatctcccgggaggcggtccaatgaaagctctgcatctgttttgtctggagctgggacgtctattccaaagccgcctgacctggctggtcattttactgactgtgctctccccactggctgggctggtgctgtacaagcccaccgccgccgacaccatgctgtccatgtatctggctgatcccgccctggccgggggcgtggtggggggcatcctgttcggcctgctgacagtgtacgagctggaccgcacggagcgcagccgggtgggcatgctgatggacgctgcggtctcccccctgaccatggccctggtacgcctgcccgccctggccgctgccgctgtcctgggtctgggcctcaccatgctggtttggctccccatcagccgggagctcatcggctccgtctttggcggcacggactacctgctctcctatctgctgttcatggggctggccctgtggctggccattctggcggcggccgccgcctatcagttcacccggcgctctgacctgtccctggtcctctttgccgccttcgccgccttgagtctgacggtgtgggccgggaagtggcagctgtgctggctcaccccctgcgtatgggccctgtccgatgacttctccaacttccgactctaccggtcggtggcctatatgcgcctgacctggctggcagccctggcgggggtttggaccctctcctggctgtgtatccggcagtatgggaaggggcttctgggctccctggcccggagcgcccggcgggtctgtcggccgttgatcgccctgctgctcctggcctgttccggtgcggcctatgcagctcagcccttctttgacaacagcaatccggacctcaccgcctcccggctcttcgaactggagtatgccgagggagtcacctgttccaggcgcaccgcccaggtattcccagacaccgccgctggcacggtggagggccgagccgcctatcagttccagaacacctccggccaggggtggacggtctgcttcggtgtggacccggggtacgacatcacttctgcccgtgccaatggggcggagatctcccctgtccgcatcggctacgaggagtccaacatggctctgtgggagatcgccctcccggcggacggcgcggtggagctggtgctggagtacggcggcttccccagggactggaacattgcggagaccacccagggctcccccgagatcagcggagcctatctgtgcctggagaatcagaacctgatgccctatctgctcaatgttctgccagaggggcagggctatcccaccaccgtggagctcaccgtgcccggctccatgaccgtcatccccttcggtaccagcgaggcagaggtggtggagacccacggcaacggcaccgccacctggcgctatgaggatgacagcgctggcggcatcgtctacgccggggactacatccgacaggatatccaggccggcggcgccaccatccagctctactatggccggaagcatcaggcggtgatggagcaggccggggcggcggatgcggtgcgggccgtggtggactactgcacagagcactacggtcccctgtccttcagcgctggcggctctctgaagctgatccagagccgggtggccggcgggggctacgccgccgggggcgccagcctgctggacgagatggacttcactgccgccaatctccgcgacggcggcaagggggccgtccccggcgaggtgatgatccacgagctggtccaccagtggtggggcctgggcaacatgtttgactccgaggaccccgcagatccctggtccgccgaggggctgacggtgtacaccacctaccgcatcgtcaaggagctctacggggcggatcacgcacaggaatactacgtggaccagtggaagcgggaggtggaggactactacctggatttctacgtccgaaacccagagtacctggccatgctgcccgaggaggagcagctggccatcaccaacagcctgaccggcatgcggcagtactgtgagatgcccctgaaaattttgagggcagagaagctggtagggggtgaggcggccatggatgagatcctgcgcggcctgttcaaccgtgagctcgattggagctatccctatctcacctatcaagaatttttagacgcctgcgggctgacagaggaggagctggaccttggtcaagatatttcgatatgagtgtaagcgcttgctgtggaacaagttctttttcggcattctggccgtgaccctgttctacggctggcaggtactcaccggcgcctccattctgggggtgtcccacactgcccccttctccccctggaccttcggggattacctcagccgcctgctccccctgctgtggatcggtgtgctgttctttctcacctttttcacttcaggggcggagcggcgggccgcagtcctcaccgccgccacccctgtgcggccctggcaatacgccctggcccggctgggggcggcactgaccggcaccgtcctccagtcccttgccgtcctgctgctgtccgctgtcttttatgcccgcatgtttcggtggtacagctggggcagtctgttccttcccgccgccatatccctgataccagctctggtctttgccctgggcagcggctggctgctgggccgcctgcgcccctggctcgtctacctgtggatgcccctgcccttcctgctccagctcctcccccttcccgagctgctctccctgtggaacggccggttcttctcccagtaccccctgtccctggggacactggacccggccttttccctgcccgggggcatgtgcctggtccaatccgggctcctggctgcgggcgtggtcctgctgaccgccgccctgcaccaccattcccctggagagtgagccatcttccccattccaaaatcttctgcctgggggcgccctttcccggggcgtccccttctccgcaatgcccattgacttttttcctacaatcctttatgatagacgtagtcgcgcgggtatggcggaattggcagacgcgctggatttaggttccagtgggcaaccgtgtgggttcgactcccactacccgtaccagctcgtcgcaagcgacatatcacttgcgacgagctttttcatttcattgtaaagcttatcgttcgctcattctgccgctcctctcttccaaaccggacccgctccgctgagctccggcttggggccgccctgcgggcggctgtttttgccctcgtaaaaatatcggttttgaccgtcctttccacgtggtggcaaagttcgctttgtgaccacgtctttttatgcctgaggcaaaaaagacgtcatccgcccgcccccttgctcttccttttcaaatcgaatccgctccgcc

SEQ ID NO: 13505 - DNA, 21395 bp, Unknown
  gut microbiota DNA sequence
ccttttatgcctgactgcctggaagaaaacggagcaccaaaacttacagcttgcctttgcaccacataaaagttacaatttggttacaaaatagagcaaaggagcacgagagcatgagacgactgtttttccgatgggccgcggccgccctgctggcgggcgctctgatgataccggccgccgaagccgcccaactccagatcgatgacaggatagtggatccctccgccgcatggacggaggaggggacgccctatgtgacgctggccgccctgtgccaggcggcggacggatacacgctgagctggaatggggcagcggcggcgctgacagcggaggacctggaactgacggccacccccggcgccctctacgtggaggtcaacggcagagccctgtatgtggagcacggggtacaggtccgggatgggaggatcgccctgcccctggaggtgctggcagaggccgccggtctccagctgacctgggacgaggtggagggagccgcctggctgtccactgaccaggcccagcccgcctctgccagctacccggcggaggacctgtactggctgtccaggatcatctcggcagagagccggggggaacccctgctgggccagatcgcggtgggcaacgtaatcctgaaccgggtggagagcagccagtaccccgacactgtggagggggtggtctttgacacaaagtacggtgtccagttccagccggtgtccaacgggaccatctatgacgccccggcctcctccagcctggtggcggcgaagctctgcctggaggggaccgacgtggtgggcgagagcttgtattttttctcccctgccctgtcggcaggcagatggatcgtgagcaacgccacctattataccaccatcggtggacaccagttttatgtctgaaaaactgaggcgcggagcatctgctccgcgcctcagtttactcttcttccagatatccccttcggcctccggcggggacacacaggggaaaacaggacggaaagggcccaaccgccgggttgaccggctcagacctccataataacaggcaggatcatgggggagcgcttggtcttcttatagaggtagttggacaggtcccccttgaccgcacccttgatggcggaccagtcggtggaatagcgggcgtccacgctgttgatggcctccagggccacctggcgcagctcctccatcagcccctcggactccttcacatagacgaagcctcgggtgatcaggtcggggccggagaccaggctgccgtcctccccagacatggacatgaccaccacgatcatgccgtcctgggccagatggcggcggtcccgcagcactacgctgcccacgtcgcccactcccaagccgtccacaaagacctggcccgcagtgacagtgcccgccagacgggcgctgttctgggtcagttccatgacccggccgatgtcgctgatgaggatatgattggagtccatccccatctcccgggccagctttgcgtgggtctggagcatgcgctgctctccgtggaccgggatgaagaacttgggcttgaccagggcgtggatgatcttcaactcctcctggcaggcgtggcccgacacgtggagggccagctcccgctcgttgagcacctccgcccccttgcggtagagctcgttgatgacgttgccaatagagtgctcgttgcccgggatggcggaggcagagatgatgatccgatccccggggaggatatccacctgccggtgggtggagaaggccatgcgggacagggcggacatggtctccccttgactgccggtggtgatgatgcacaccctgttcttgggcagggacttaatctggttcaggtccatcagcactccatctgggatgttcatatagcccagctcggtggacaccttcatggcgttctccatgctgcggccagtgaccgctacccggcggccatagcgggcggccacatcgatgatctgctggagccggtccacattgcttgcaaaggtagtgacgatgatgcgctcctcacagcccttgaaaagtgcgtcaaaggaattgcccacgctgcgctcactgcgggtatagccgggacgctccacgttggtggagtcggccagcagggccagcaccccctcgttgcccagctggcccagccgggccaggtcgatcatgccgccctggatgggggtggcgtcaatcttgaagtcaccggtgtggacgcaggttcccaccgggcacttgatggcaaaggccaccgcgtcggcaatggagtggttcacatggatgaattccacggtaaatttgccggccttgatcacgtcgcccgcctcgcaggtgatgatcttggtcttgtccagcagccggtgctcctccagcttcaggcggatcaggccggcgctcatccgggtggcatagatgggggcgttcagggagcggaggacatagggcagcgcgccgatatggtcctcgtgtccgtgggtgatgaaaatcccccggaccttgttctggtttttgatcaggtagctgacgtcggggatgaccacgtcgatgccgtacatgtcgtcatcggggaaacccatgccgcagtctaccaccacgatgtcaccgccgtattcatagacggtgaggtttttgccgatctcgttgagaccgccgagagaaatgatcttcagtttttcagccatacgatactccttgtttttgatttgtcaagttctggtctatgtacggctgggcgcaaaacaaccgggcgaaggacgcccctgctttccggccctgcctcgccgggaaacggggtgtctcttcgcctgatggagcgggggccaggggccgcgccgctcccgggaggcccgccggggcatccggcggctgcgctctcgtccgtactgtgtgtccccatggacgggtgaccgcctgcgtgcgggccctgcatgggttatatttaggcgcggggagggggcgcctgccaccctgacgcgcataaatccaaaaataagcaaaatacagtataacacatggggctggaaaagtacagcctaaattttccgccctttttcctgacaggcaggtcctcggcttacagccgctccccggccgggctctccctctgctccggcggagggagctgccgggacagctcccggtccagctgggcggcccggcccgcgtagaagtcgcacagctcagcggctacctccaggtcgggactctccgccaggatacgcagggcgggccggcgggacagggggaccagatagacccacccgttccccgtgtggatgcggaccccctcgccgcctgcagcggccttcccctccgccagggtctgcatcagcaggccccggttcccgtggagggggacctcccgcttccaggaggagaagcggggtgtcttgctcatcaaggcctccagcttctcaccggaggagcccatcctggaacagatgcgggcagcagcaaaggcggcgtcccgcagccagggcagggcggcatacagggacagggcctgctcaccgtcccggcccagccgcagagcggtgccgtggaatcctgcggccaccaggtccaccgctgcgctggccccatcgggcaccgctacccgccccccgccgtcctccatctcgatcaggcagaccagggtgagcagctgccctgggtccagaagagtgccagactcgtcctgagcggagaggtagagcccgccgtggagcccagagaaggcgggcacccctttccgccagcggtccaataccgtgcagcccaggctggaaagggcctgccggatggcccggtcagcgggagcggatccggggacggccacggtgatggagcgcatggggaaacggtggagacggctgcgcctggccgcgtcggcggcgtagtcatcacagcccgcatggacccggaccacctcgccaatctgaccggcggggacccggggggcgtccccctgggctacggcgtgttccagcttccgctccctggcccggcccagaggcaggccgctgcggccgaagagatggagatagatgcggtccccctcctgctctaaaaagagagagacagggatctgatggtgctccgccagccaggcggcctgggcggcgcactccaggtcatgggccagaggggtcccgccggccgcggcgatgccgctggcggccgcctgggccagcatgcgggcaccgttcccgccccagtagccaaggcccaccttgccctcgcaccccagcacgccgccgatggtcatcagggcctccgggcccagatcttctcccagtacgccccggatcaccccgccgtccccgaacagaagaggctcccggcggccggaggaagtgatggagcgggacagccgcgtcccagcaggggcaacccgggctggccagaggcgcaccccctccagcagtacggccttctcctccgccaaggccctctctccaaggacggtcccctcgttgaggacggcctccggccgggcggcggcccccttgcagaggatggctccgtagagggtggtccgctcctccgcccgggcgccggggaggagcaccgaccgctggaccaggctgcggcgtcccacccagctgttctgctccagcacggtatgggggccgatcagggcgcccggctccaccgccgcccccgggcccagccagcagggtgggatcacggtgacaccctctgggatgggctgggcgctccagacgccgggggactgctgaggcaggcccatatccagcttcaccttcccagagagggcgtccgccgcacagtccagataggccccgcagtcccccatgtcgcaccagtagccgccgccggggacgccgtacaggccgccgccggactccagcagggctgggaacacatcctttccaaaatcccagggcctgtccggagggatctgctccagcacctggggggagagcagatagatgccggtgttgaccagatcggtcaccacctgcccccaggagggcttctccacaaagcggactacccgctgctcctcgtcggtgaggaccagcccgtactccaggggcgcgggatgacggaagaggaccagggtggcctgggcccgcttggcctgatggaactccatggcggcagtgagatccaggtcgcagacgctgtccccgctgatgaccaggaagtcctctccctccaggaagggggcgcaggcccgcacgctgccagcggtgcccagcggggcctcctcgatgaagtagtgcaggcggaccccccacttctgtccgtccccgaaataggactgcactgcctccggcatgtagcacagggtgacggcgatctcgtcgatcccgtggcgcttgagcaggccgatgatgtgttccatcaccggccggcccagcagagggaccatgggcttcggcatgcccagggacagggggcgcaggcgggtcccctctccgcccgccataatgacagctttcacgatgtgtttccacccttccggccgggctccgccggggcggagcgggaacggccctgtatttgtagcatctcctagtatgaccagccgccggggaaataaaccggttccggagcggttttgacttgtgccctgggagggaatatgttatacttagatatacataatttaacagcctgaggaaggacacagggaccatgcaggccgccctgcccggcgggggcaggggacgaggcggcccgcgcttccggaggatatcgtaatgaacatacagatttttggcaggtccaaatgctttgataccaaaaaggcggagcgctggttcaaggagcgtcgggtgagatttcagtctgtggatgtggtgaagtacggcatgagccggggggagctgtccagcgtgaagaacgcggtggggctggaggccctggccgaccccaagcacccagactatcctcttttccagcatctggcctatgaccaggacaagctggaccggctgtgggaggaccagaccatgctgcgcacccccatcgtgcgaaacggcaggcaggccacggtgggctactgtcccgaggtgtgggccgcctgggagtgaatagtccgttatatgggacacaggttccggtatgctgagtgcatcaccggaatgaggaggatgacccatggcgaagagtcccaatcaaaagctgaaactgctgtatctgtatcagatcctgctccagcgcaccgacgaggagcaccccatcaccgtcccccagctgatcggggaactggacctgcggggcatccgggcggagcggaagagcgtctacgacgatctggaggccctgcggctgttcggcctggacgtgcagagccggaagggccggtccccgggctggttcgtgggccggcgggagtttgagctgccggagctgaagctgctggtggacgtggtgcagtcctcccgcttcatcacccggaagaagagcgacgccctgatccgcaagctggaggggctggcgagcagccaccaggcccgccagctccagcggcaggtgtacgtcagcggccgggtcaaggccatgaacgagagcatatattataatgtagacaagctccacacggccctctcggcccggaagagcatcaccttccgctactttgactacgacatgcaccggaacaaggtctttcggcgggaggggcggcgttacgccgtctctccctacggcctgatctggaacagcgagaattactatctggtggcttacgacatctccaaccaggagatgcgccactaccgggtggacaagatggcggagatcgtggtcaccggcctgccccgggagggggaggaccgctacccggattttgatgtggccgcctatggccagaagcacttcggcatgtacagcggggaggaggccagcgtcaccctgcgctgccgcagccacatggcgggggtggtgtgggaccggttcggccaggacgtgatcctggtgccggaggacgaggaccacttcaccgtcacgctgcctctggtgctcagcccgcagtttttcggctggctgttcgggctggaggacaatgtggaactgatcgcgccccaaaaagcggcggaggaataccgccggaagctgaaggccgtgctggagcagtacggctgaaccccgccggaggaggggcgggggacaacaagacacggaggaggtcgcccgatgaaacggatcttagtcgtagacggggatacgggtgtgcgcgcccggatcgcaaaacatgcccggatggagggctatgatgtgacagaggcgggggacggcgagaccgccctcagcctgtcccggcagcagaacgcatttgatctcatggtcctggcggtgaatctgccggggatggacggctttacggtgttgaaggcggtccgcaccttctccgccatcccggtgctgatcctgtccagcaaaaacacggcggaggaccgcatccatggcctggagctgggggcggacgactatatgaccaagcccttttcggcgcgggagctgctcctgcggatctcggccatcctgaagcggtgcagcaccctggcctcggaggaggcggaggtgctccgcagcggcgggctggtgctggacctgactgcccggcgggtggaggtggacggccgccagatcaacctgacgcccagggagttcgacctgctcaccgtgctgatgagccacccggacgtggccttctcccgcaagcgcctgctggacatcatctggggcggggagctctccactgacacccgcaccctggacacccacatccagcatatccgctgtgccatcgtcccgtacagcgaccggatcgtcactctccgcggggtgggctatcggttcgagaaggaataaaaaatgcgctgcagggaaatccctgcagcgcatttaaaaattgattgatatctaaagataaaactgtgctcaaaagaccagagtaagaagggccagcccaaggctggcgagtcccacgaccaggctgactgcactgccgattgatttcatagacgccttatgtttgaggaaatcagcgtgctttcgcgcctcttcaaggatttggtctatatctgcgaactgattatatgcctcttgatatagttcaaacagggtatcctccgaaatgttggaggtttccgcacatttggcagctttcaactgctccgtagcggcctccctcaactgatggacacgtctcagaaagtttccatcctccaaataagtcagatccaccccatgataatcacggaaaaactcctcatactgatcagaaaaaatgatgcagctgtatttgtagcaatctaagagcgcacgcttggtatgtgatttgattttcgcaagattacgctctgcttcttctggagtggcagctattgcggccctggccagatgcccatacattgcgcggatctcattttgaagctcaatcggaaattcgttttttaatatttcaaattgaacgataaacggattgatatcatctaaatagacttggaacacttcgtctaattgttctttgtgtgccaggagaaaattgctgtcgactgtggtgctgccagtcatattacttcatccttgctatcatttgatcaatatcgctcatagtagaaatacggcggcgaataataagcagatttccgcgtccggtcattctggaatccatttttttagaaaaaatcaaattttttcctgttttttcttccacaaaactcttttcttcaatcagatccattttcttgagatcgtcggcagattttccgatgattctttctagggtatcacgagtacgttgattcaagtacataaattaccctccacgctgtaatggcggaccgtttggtcacttcaaaaggccacttccaagctcataatgtgctatccattatacctgaaattaccaggaaagtcaatgcccgtttaatagcttaagccgcctccttttctgtcaggggagctgcactcatgcggggcggcttccagccgccccaaaagccttcccccctgtggggggaaggtgtcgcggcgcgagccgcggcggatgaggggtcctcctccccccgtaccagtcacagagcatgccagagacaggcggggacaagccccgcccctgcgcagaggcccaagatctcccgcaggcttccagctgccccaaaagccttccccccacaggggggaaggtgtcgcggcgaatgccgtgacggatgaggggtcctccttcccccgtcccacccacaggatatgccagaggcgggggcgcaaagcgcgcccctgcggagagaccgaaaacgcccctgcccccagctccctcccccaagttgcacccccgcgtacaaccctgcgccgcctcatgataatatataaggaaggaccctctttttggggggcgccggcccccctcaaaggccctctgtaacaaagccgacgcaatgttaccgttttgttacatcttgctccggccgcttgacgatttcgagcttttgagatatcatacacacacaggcaaggggagttgtactttcctgattttggtaaaacccctaaaattcaagaaaatagctctcatttgccaaatataaaaggaggaatatccaatgagaaacctgaagcgcgctctcagcgttgctctggcttccgccatgctcctgggcatgatgatggtcggaaccagcgctaagggcatcgacgattttaccgataaggataagatcgtcaatcaggacgccgtggcggtcaccgccgagatcggcgtgttcgacggctacgagaacgggtcctttggtcccgagaacgtagtcacccgcgccgagatggcggtcatcatctgcaccatgctgtatggcgccggtgtgaacgtcaaccagttcgcggagaccagcgtgttcaccgacgtccccgactgggcggagggctatgtgaacctgtgcgtcagcctgggcatcgtggccggtgtgggcgacggcaagttcgaccccagcgccaccgtgaccaccgcgcaggccgtgctgatgctgtgccgcactctgggctacttccagagcgccactgacttcggcaacgactggatgctggccgccaccgccaagggcactgagctgggcatgtacggcgatctgaagctgaccgccaatgccggcctgacccgcgacaacgtggccgagctggtgttcaacgccctgaccaaggctgtcaccgttgagtacaacgacaccttcaacatctacttcaacaccggcagcacctgggccaacggcgtgaagttcgactacaagcagaccctgggctacaagaacttcgacctggtgtacatgaatgacgaggatgacttcggccgtcccagcaccgtgtggggcaccggctccctggccaacgtgtctctggacgacgagggcaacatccccgacagctacaagggcatcgctgacgacgacatcatcatcagcatggccgacaccgctacccacacctacactgccaaggtctcttccaagaccctgtacaacgatgtgggccgcactgccgctcaggactatgactggaccgtttacaccaacggcgaggccaatgagtactccttcgacggcaacgacctgtatgacaaccgtaccagcactgactgcttcctgaaggaggccgctggcgagaacgtgaccggcaacggcgttctgactcaggtctatgttgactccaaggagaaggaagttaccgtctccgtcatcgacagctatgtggctgaggtctacaaggtcgatgagaaggacggcaccatcaccctgtccgacctggtggacggccccgccgacgccagcgacgacgagtttgctaccaccgcttttgcggaggacgacgtggtcgtctacacctacgccaacgacgagatccagtctgttgtcaaggctgagtccgtggaaggcactgtcaccaaggtgaaggacaaggacaacttctccctggacggcaccagctactcctactccaagaacatggatgccagcgacaagctggacaccgatgatgtggacgccgagaccgtggcctatctggacgcctatggctatgtgatccatctggacgctgacgccgtggctcaggattacgcctacgtggtgggcgttggctccgccaacgacaagtacggcgatgacgccgacttcggcgccaccctgctgctcaccgacgccaccaagctgaaggtggacctggattccgacagcacggacaagtatgatagcactcaggaggcccgtgaggctctggagggctacatcgtgtcctactccaaggacagcgacggcctgtacactctgaccaagaggagcgacaaccgcatcgacctgaaggataataccttcaacgccaccggtctggagatcaagtccggcacctccgccatgaagatctttgcgaccgacgactactatgccaacagcagcactatcttcctgctgtacgacggcgacgactacaccgtctacaccggcatcaagaatgtgcccgacgtgaagggtgacgcggacaccaacgccgttgtcttcgacaagggcggcgtggccaaggtggtctacatcgagaacgccaacgtggacggcgacgacgaggtcatcttcgtggtgggcgacaccggcgccaaggcccagaaggacaacgagaccaacaccaagtactatgagtaccaggccatggtcggcggcgagatcgtcaagctgaaggtccgcgacggcgacgcctatgacttcttcaagaccatcaagactgatgagatccaggtgctcagcggcctgacctacaacaaggacggctttgtcaccgactatgacaagaacttcaccgattggaccgtgaagaccggtatcggcaccgagggcgaggacgacgaggtcatcggcatcggcgatgccgccggcaagaactatgcgacctacgcctatgacgaggacgtggtggttgcccgcttcgacggcgacgacctgaccaagtccaccatcggccgcatcaaggacgacggcaacgacaaggtcacctatgtcctggacggcaaggtgctgatgggcgtgtgcattactgaggtcaagggcaccgatgcccccgttgcctacaccgtgaaggtggacaatgccaccaatgtggactacaccatcaccgatgagaacaacaacagcaagaccaatgagagcctggtcctgaccgagaagaacctggatgtcaccgtgaagatgactcccaagaccggctatcagtgggctgacaacaagggcactgagacccgcaccgtgactctgaccaaggtcaccgaggacaagacggttaccgctgatgcggttgaggccgttgccgccactcaggcgaccctgaccctgaatctggacggcgcctatctgaacatcaacaacaaggcctactggaatggcgacaccatctctgctgactttgacagtgttctgaccgccaccgtggtgcccaccagcgcctccactgaggagaacaaggtcatggcgaagcccactatcaccgggaccaagaacgacgtttctgtcgctggccagactctgaccattgttctgggtgagaatggtgaactgactgtggcttatgtctacgataagtatgatctgactggtactgactctgtcagcaattccacttataacgtggagaatgtgaacggtaagtatcaggccggcgctgacgtgacgctcaagctcacccagaagaccggggctgacctggctaccgacgctcaggtcactgtcaccatcaatgacggggccattaaggctaccgcccaggtgaccaaggctggtcagactgccgcctcggctcagtgggacggcccgaagacttacgcgagcgctcaggaactcgagaatgccattaatggcctgcccgagggccagaccatgtggaactctgcgaagaatacccaggtcaccagcggtctggtctggacttccgccagcgatgagttctatatccagacctccgcagaggttgttgaggctaagggtgagatcactgtgaccttcaccatgcccaacgcaaatactgaaattaccaagattgaagttcagtaagcgtcatctcacttaaacctgcggacccctgtgcataatgcgcaggggtccgcatgccttatcacccaatggcaaaataaaaatactccacgccctcagaattcatctgggtggaggggttgtcctttgaggtgtaccaggagacctgatttcccgaccaggtgacattgacatagaagtcgatgtgccccaggccgcctccctgggtgacgccccggaggaggagcaggccggagcggtcggcggaggagccggagcggcgcaccgccaaaagctggggcgggaaggaaaaggtgagggagacaggggactccgggccgctggtcccgtttccggtgtagctgccgaaggcggtgcggggcatggagccctccacggctgacaggcggcgctccacgccgctcaggccctcctgatccgccttactgtccagccgcccctccagcgcctccaaggcggtctggtccgccttctgggccacaaggccggagagctgggagagggcggcggtctccgccttggactgtgccagcgcgtggagcgccccgtccaccgcggcgttgtccgcgttgaagtcggtccgctccactttgtccgaagcctcccactggctcaacccataatgttcagtgtgtctgcttgccatgatcgatccctctttctattaaaaatgatttcatagaagggggaaaccgggggctatgtgggacgttaaaatacaaataatgggatttcagggaaactgtgcccatttttatccccagacagcggcccgaggggatgagacgggagaaaacggatatcctaccatggggacctgctgtgatgtgcccgcctgcctgctgaggccgtccctgtatgggaccctctccgcacagcatattcttgcaggaacgtgtctgtaccatgttccaccgggacgccgcctcccgtgcgggggcggagggcgggcgcatcaccgcaggcctcttctgaatatcaaagggacacagagcagaaatagcccggacacggcggaggccgcgtccgggctatttgtatcgcgctgtttactccaggatggccccccggtcggcggaggaaaccattttggcgtaccgggccagatagccggtcctgatcttgggctcggggcagacccacttggcccgccggacctccagctcctcgtcggacaccttcagggtgatggagtgggcggggatgtcgatggcgatgaggtcaccctcttccaccagaccgatgggtccgccagaggccgcctcgggggacacatggccgatggaagccccccgggtggcgccggagaagcggccgtcggtgatgagggccacatccttatccaggcccatgcccgcgatggcggaggtggggttgagcatctcccgcatgccgggaccgcccttggggccctcgtagcggatgaccactacgtcgccggccacgatcttgccggcatagatggcctggatggcgtcctcctcgctgtcgaacacccgggcagggccctcgtggaccatcatctccggggccacggcggactgcttcaccacgcagccgtcgggggccaggttgcccttcagcacggcgatgccgccggtcttggaatagggagcctcgatggggcggatgatctccgggtcccggttgaccacgcccgccaggttctctgccaccgtcttgccggtgcaggtcataaggccggtgtccagcaggcccgccttggacagctcggccatgacggcgtagacgccgccggcccgctccaggtcctccatataggtgttgcccgccggggccaggtggcacaggttgggggtcttctgagagatctcattggccatgtcgaaggagagctcgatgccgcactcatgggcgatggcaggcaggtggagcatggtgttggtggagcagcccagggccatgtcgatggtctcggcgttgtggaaggcggcctcggtcatgatgtcccgggggcggatatcccgctccaccagctccatgatctgcatgccggcgtgcttggccagccgcaggcgggcggaccacacggcggggatggtgccgttgccccgcagccccatgccgatggcctcggtgaggcagttcatggagttggcggtgtacatgccggagcaggagccgcaggtggggcaggcgttgttttcatactcctccaggccggcctcgtccagcttgccggcgtagtaggagcccaccgcctcgaacatgtggctcaggcaggtgcggcggccgtcattcatagtgcccgccatcatggggccgccggagacgaagatggtggggatgttcacccgggcagccgccatgagcaggccgggcacgttcttgtcgcagttggggatcatcaccagaccgtcaaactggtgggccatagccatggcctcggtggagtcggcgatcaggtcccgggtgaccagggagtacttcatgcccacatgtcccatggcgatgccgtcgcacacggcgatggcggggaactccaccggggtgcctccggcggcacggatgccggccttcaccgcctcggcgatcttatccaggttcatgtggccggggacgatctcgttgtaggaacagaccacgccgatgagaggccgctccagctcctccttggtatagcccagggcatagagcagggagcggttgggggcggcgggggccccctttttaatgacatcgctgcgcatgggaattgacctcctcacagatccagactcaagttgtctgatttctcttgcattgtctgactatatagtataagatagaggggaaaatgtcaagagggagctgcgcctccggcacagagaaaaggagaagagagaccatgtcgaagcggaatctgtcccagcagacggcggaacgcctgtataacagcatcgtggcggagggcacgctgcggcccggggacaagctccccaacgaggtggagctctcccagcagctgggggtgagccgcgccaccctgcgggaggccatccgagagctggccgcccgtggagtgctggaggtccggcgggggcgggggacctttgtgtcggaggaagtggcggacatcgaggacttcggcttctctgggctggagcggcttcagggccagctgcgggacctgtttgagctgcggtccatcttcgagccaaaggccgcccggctggcctgccagcgggccacggaggaggagctgcgggatatcctggagagaggggaggcggtggagcggtgcatccgggcaggacaggaccggacggaggcggaccgggactttcatgccgccatcgtgcgggctgcccacaacgaattcatggtccggctgctgccggtgatccaccaggcagtggccgccgcagtggagagcggagagcacggcgagcagctggcagaggacaccctgcgggaccacgccctgctgctggaatttttggcaaagcgggacggagagggcgcagagcatgccatggccatccacatgtgccgcagcatggaggtgatggggctgggatgagacgggcagaacgccggcctccctgcctgcacaaatcttgaactgggacggaaaaggtaaagtcttgacgaaattggtgtaaaatgctatgctaaacctagaggtccacaggggaatggacattcccggcggaagatgctccgtgctgtggttccacgacaacttgaagaacaagggggatgctccctgatggaggatgacaggacttcgcaccggaccgggtcagcaagtcctgttatttttatgcctctcacgggcaggagggagcgcgggagatcgtatggaactgtcatttgcatcatttgtacagcaggtcttttccagcccggccatgctggtcacagtcctgctgacgctgggcgtcattttcgtcaacggatggacggatgcccccaacgccatcgccacctgcatcgccacccggtgcatcaacgtccgggcagccatcctgaccagcgcggtgttcaacttcctgggtgtgctcatcatgacccacatcaacagctcggtagcctccaccatcagcaatatggtggacttcggcggcaacacccatgaggccctgatcgccctgtgcgcggctctgttctccatcgtggtgtacagcgtgggggcggcccgcttcggcatccccaccagcgagagccacagcctgatcgcgggcctcacaggggcggctatcgccatccagaacggcattggcggcatcaacatgggcgagtgggtcaaggtgctctacggcctggtgctgagcctggcgctgggcttcctggccgggtggggcatctgccgcctggtcatcctggtgtgcgccgggatggaccgaaggaagaccaacggcttcttccagggggcacagatctttgctgccgccgccatgagcttcatgcacggggcccaggacgggcagaaattcatcggcgtgctctttctgggcatggccttctgcggcgggcaggagagcgtcaccgggatggtcatccccgcctggctgatgctgatgtgcagcaccgtgatgggcctgggcaccagcgtggggggcgaaaagatcatcaagtcggtgggaatggatatggtgcgcctggagaagtaccaggggttcgccgcagacctggcggcggcggcctgcctgctgctctccagcctgttcggtatcccagtgtccaccacccacaccaagaccagcgccatcatgggtgtgggggcggtgaagcggctctccgccatcaatttcggcgtggtgaaggacatgatgctcacctgggtgttcaccttcccgggatgcgggctcatcagctttgtcatggctaagatatttacggcgatcttctgatcgatcatggggaggaagagtgttatggcgaaaaagagtgattccttttatttcggcaacttctacgcttgtgcggactgcgcctatcaggcggcccacctgctggagcgggtcatgcgggatttcgatcccctgctgatccgggagaagctggacgacatgcacaaggtggagcacgccgctgacgagaaaaagcacgaggtgctggacgctctggtcaaggcgttcatcacccccatcgagcgggaggacatcatcctgctcagccagaacatcgatgaggtgacagacaagatcgaggatgtgatgctccggctctactacaacaacatccagagcatccggcccgactccctggagctggtctccatcgtggtgaagagctgcgacatggtcaagctcatgctgaaagagttcgcctccttccgccactccaagagcctgcgggaccacatcatcgccatcaacaccctggaggagcaggcggatcaggtctttgtgaccagcatgcgggagctgcacaccacctgcaccgacccggtggagatcatctgctggcgggaggtctatttctaccttgagaaatgcactgacgcctgtgagcatgtggcggacgtggtggagcagatcgtaatgaagaactcctgaccaaagacgcatatgctgcgctttcaggacccggccatccaggggagaccgggtctttttttacacaggatgtaaaaagcatttgacatccccgcacatccatgttagaatcaagatgtcaaaagaatttgacattttgatttgacaaggaggcagcgtcatggaatccaacgggacttctatttttgtggtgatctttctggccgtgctgatcctctccgcagtgctgatcgtgtggatgttcgtctccctggtccggtcggagctggaggacgagcggcggcagatgatcgtgggcaaggccagcacctgggccttcatcgccgtggtgggcggcgacctgatcgaggtgatccggacggcggtacagcagcccagcggggagccggcctccccctttatccagctggtaacggcggcggtggtgtatgcggcctttttgggctggttcaagcacaagtacggaggctgagcatggagaacaagatccgggcgctgaggagcgagatgggcctctctcaggaagagctggcccgccggtgcggagtgtcccgccagaccatcaacgccatcgaaaacaacaagtacgaccccaccctcaccctggccttccacctggccggagtgctggggaccacggtggacgagctgttcctggggccgggggaaaaatcctgctgaaattggcggggacccgtttacaaaatgggtccccgctgttaagcttgttttagaaaagactctctctggaacagatgggaggcgcgggaaatgaagcacggaacgatgagcctgcgggaccgggcggcggcttgggcctttgccctgttctcggcggcggccctgctggcggtggccgcccaggtcttcctgggggtccggccgctgcaggggatgctgccccctctggaccaggtcacggagttctatgtatccccctcccacaaggatatggtcaggttcacagtggaggagaacggcctggtccaggccctgggggagctgcgggtggcctggcgggggccctatcaggccatccgctatgagcgggggcagcatacctatcatatcgatctgttccgcacctacgagcccttgggggatgtggtcctgtatgagaacggttttctctgcttcgaggggagcctcttccgggtggaggagggagcggcctaccagcggtgtctggagctgtgccgggaggccctgccatgagcgggcgggaccgggcggcggagacgccctccagagatatcccatagaaaaaagccggccggaataaactgcacctcatcctgtatccatagatagacccggccccgcgcaggtccggcagatatcagaaaggaagtagaagatgaaacgcttttggaaaaaaagatggctgccgctcccggtcctgatcccgctcctgctgtacgcggcggcggcggtctggaccagcacccggaacgtgtcccagctcccggtgctcatgtaccaccacatctcggaggacgtggccaccgatatggtgatctctcccgcccggttcgaggcccatatggccgccctgaaggagcacggctggaacagcgttaccatccggcagctcattgaatttggggagcaggggaccccgctcccggaccacccggtgctcatcacctttgacgacggctataccagcaatctggagctggccgcccccatcctggagcgccatggcctgaacgccgtcatctttgtcatcgggatcaacgccgggcagagcgtctatgcccactcgggccagcccctggacccgccccgcttcgccctgaaggacgtccggccctatctggagtccggtgtgctggaggtggagagccacacctttgacctgcatcagcgggccgactacgggtacagcggccgcgagggggtgctgcccctggcgggcgagccggaggatgcctaccgccaggtcctcgccggcgactgccgtcaggcccggcagctcttcgcccaggagctgggccagcaggtcaccgccctggcctaccccttcggactggtcagccaggaggcggaccggatcttcggggaggaggggatcaaagtgaccgtcacctccgtcttcggccccaaccagatccggggcggggaccccgcctcccttcggatgctgaaccgctacgccatcacggacaacacctccacccaggagctgctggatctggtcaactggcataaggagaccttttgggaaaaggtcctgcgccatctggggctggagccctgagttctcccgcagataatgaccgaatagaagaacttgaacgccaatgatggttttaagaaaaatttaggtggatgattttggatgctggttctaaaaatactatcatttttattggcaatatcctacatcctgttatttccaatgtttccgcaatacccctgggagagcggtgttttagctgaatatcttggagaaagtctatttttacagatctatattgtgacctggatccttgcaattatatatgagctcatcatattattaagattttactgccgaaaaaaatatcaatgtactttttcgatttttttacctgccgcattttatcaattatatcaatattatccgccttttcccattttgagtcagtttttttgctttcttgtcctttcagtaaaagtaattgagattattttttggcataaaagagtaaagaataacgctcctaatcaagggatacaaatactgttagagttccttgtgatgacttcaatattgataacaacctttttttgctgaatgacaacactatagattataacaaaagggttcttgagcatatgctcaa

SEQ ID NO: 13506 - DNA, 40586 bp, Unknown
  gut microbiota DNA sequence
cgtcacggcatatgccgtgacaccttcccccctgtggggggaaggcttttcgggcggctggaagccgcccctacggggtccccttcggtctttgcgtaggggcgcgcaaagcgcgcccgctgtttcacatcgaccattccacagggcccaccggcctcctgtggaaaattttctagggtcagaagagagcccgggaaaaccctgtggttttcccgggccctgtttttgatatccttcgctcacacctgggtccagacgttcccgtcctcctggctcttcaggcaggcctcgataaatttcagcccctggatgccgtcatcgatatcggagtaggggaagggccgctcatctttgccctccttccgggacagcagatgggaacagtaaccccggtagaagttggcgaacagggagtggaaggcctccggcatccccttggggaggcggcaggacttccgggcctggggatcacagtagtcataattggccgaccagatctgggtgggctgtccggcgatgtccacccggagctccatgaaatcgtgggcgttccactccatgccccctttgtcgccgtagatgcgcaccttcatgcagcagctcttgcccaccatggcgaaggaggtccagaagatgcccgctgccccgttgtcgtagtcgatgagcacctgggcgtcgctctccaccggcacataatccgggatggagcgcaggcgggccagcacccgcacgggcttgaggccggtgaccttgctgatgagatactccacatgggtgccgatgtccgcgatcactccagaggggccgcagatggccggatcgacccgccaggtcaggccgtcctttccccggagggcagtgttcagccccacccactcctggggatactcggcggcgatggtgtggatctttcccagcaccccgtcagcgatcatctttttggcctgctccagaatggcgtagtgggcataactgtaagacacgccgaacagaagatctttttcctgggccagggccttcagctcctccgactcccggctagtgaaggtgacgggtttgtcgcagacaatgtggaagccgtgggcaatgatgtccttgacaatctcgtagtgggtgttgttgggggtggccaccactacaaagtccagccggtcctccccggtgcgcttggcttcctcctccagcatggtgtggtagtcgggatagatgcggccgggctccaccccccatttctctccggcctccagatttttatcccagtggcgggagaaacagcccgccttcagttcggccaggtcgtcgaactgggccccgatgcggtggatatctccgatcagggcgccgttcccgcccccgaccattgcgaattgcagctttttcatagagagacctcctgacggattgtgtaaagtgtacaagaaatcgtcttcaggataccacgcagggcggcaggtgtctaatagtatccagtcatggacccattcaaagggcacatacaagagggggagtggataaagaaaagagcacgcttgacaaggcccgtccctttgggatacaataaccatgaccgcagacaatcgaacacaggggcgctgggagctattcccggctgagatggaagcgaatcgcagctccggtcccttgacctgatccgggtaatgccggcgtagggagtgaacgatccatatgtcgtcctcttcataccgcacgcacccgttcggatgtgctgcggtatcttgatttcaggaggaaacgacgatgaaccgacattcccgctctacccgcgcccttgtggaggccgcgctgatgatcgcgctggccaccatcctgggctacttccggctgtaccgctttccccagggggggtctgtggactttgccatggtgcccatcctgatctactgcctgcgctggggcccggcctggagcctgagctgctgctttgtcaacggtgtgctccagttcttcctgggcggagggatcgctctatcctggcagtccatgctgctggactatgtggtggcttatacgctggtgttcctctgcggctttgccgcggggaagaagctgggctggctgtggggcaccctcctggccgggctgggacggtgggtatctctcaccctgtccggcggcctgctgtggtatatgtatatgccggaggaatttttgggactgcccatggtggacccctgggtctactccatgatctttaacggcgtgctgatcgttctcgtgactgtggtcaacctgatcgttctggggatctttcagtccgtccccgctctgcggcagaagctgctgacgaaacagaattgaggttttttctttgggaaaattcgacggtgtcctgctggtcagtgattttgacgacacgctgtatgacagccactgtcaggtgccccggcggaatttggaggccctggaccgcttcctcgcccagggggggcgttttaccgtggccaccggccgcgcccaccggaccttcgctccctatgtccatctggcccccgtcaatgccccggtggtcctctccaacgggtcggccatctatgacttccaaaaagacgaatttctggtgcagacctatctgtctcccagtgcgcctcaggacttggatggggtgatggaggcatttccacagctggggatggaggcctaccacggggaggatatctatgtgttccgacccaactggatcacagacctgcacatgaaaaaggtgggcaccgactacaccgtctgtcccattcgggagatgcctacgccctggaccaaagccatcctccagcaggaccacggggtgctgaaggaggtgcagagctggcttctggaccacttcccccgccggtatgaggctattttttccaaccacgtgtacctggagatcaccgaccatgggtgcaacaaggggggaatggtggcccggctggcccagatgctggggatcgcccgagaaaatatctactgcgtgggagacaaccagaacgacatccccatgatggcactgtccgccgtcccctttgcccctgccaactgtgcccaggaggtgaaggactggggagcccatatcctgtgtcactgcgacgacggcgtgatcggggatatcgtggagatcctggagcagcgatattaaaaatattggaaagagaaagatccaccgccaaaaaatggcggtggatcttttgtaacgaaatgggggagatgccgtcttatctgtggaaagggaggtgagggcgtgatcgattttgaagaagtttaccgggactatctggaggacgtctaccgattttctctggccctgtgccgggacccggtactggcggaggagctgacccaggagacctttttccgggcgctggagcatatcggccagttccggggggagtgcaccctgcgggtctggctgtgccagatcgccaagcacgcctggctgacccactgccgcaggcagagaaggcgggagccggagccggagctccgggaggaggggccggaggagcggctggcgcagaaggagactgccatggaagtccaccaggtactccacagcctgcccgaaccctatcgggaggtctttgccctgcgggtgctgggggagctgtccttccgggagataggagcactgttccataagacggagagctgggcccgggtcacttttcaccgggccagactaaaaatcaaggaggcattatgatgaatcagccctgtcccatgatccaggatctgctgcccctgtacgtggaccagatctgcagccaggagagccgccgggcggtggaggagcatgtggagaactgtcccctctgccgtgcccggctggaggagctgcgccgggaagacccgctgcccccgccagagcaggaccgggagcagtcgaaggcccgggtgctggccggggtaaaaaggcagctgagaaggaaaaagctgtgtttctccgctcgggtgctggccggtgcggcagccctgggcgtggcggtctggctgttggtctttcgcttccagacacccatcccctattcacaggatatccgcatccaggaggtggagccggctttccacatgaaatatctgggccgggattacgccggcctggaggtcctgttccgggtgacggaggagggcggggagaccatccgaagggtctatctctgctataccggcagcctgtggacccggtatctctctcccggctccccataccacgaaagtgtggggatcaacaacggcatcgtcctggacaccagacacgggacggtgatccccctccccttcgacggcggggcggatcaggtctggtatctggccggggacctggaggagctggaggatctggacgaggcctccttccaggcgcaggccggagacgcggtgctgctctgggagaggcaggggtgacacaagagggccagggtcaggggagaagagagagaagggcctccccctccgcccgggtcagggtatcctggggatgaaaggcgccgttttgagtgtccaggccgccggcggataccgcccattgggcggcgtccagcgcccaggaggcgatggagccggcgtccgtcagctcggcggtgccggagggggccatccccaggagccgggcggtctgccagaccatggcagctccctcctggcgggtgaccggacgggaggcttggaacatggcctccccggtgccggaggccacccccgaggagagagcccagcagacgcccggggcataccaggcacaggggagcagatcagacagactctgcatgggggcctgagtgtccaggccggcctgttccgcagcctgccggagcagctcggtcagccggccccggctgagcggggcatcgggccgctcctggggctggaagggctctgtgcgggcgcacagggcgtccaccaaggtatcctggcccgccaggtagtcttccagagtctgatagacggtcacgtcgggctggatgggctccactcccagcccggcggcgcactccagaagggtgcctgtgtcaataaatttggtggacatggacacccggacccccgtgttggggagggtgaaggagccggtggagccgaagtggtccacgctgccgctggtgggctcaccggccagcccgccgcccatctcccggatctccagggcgttgatgctggcggaggagaaggtggcctcccccaccagcccccacagctccagctccccgctgcggaccaggggggccagctccatcagcagggggatgatgaccccgtcggagccgccgccgttgttccgcagatccaaaagaaggacggaatagctcccctgctccaggtcggccatgacctgagcagtgaaggtctccatgggcagctccgggtcctccatgcactggttgtattggatatagtaggtgcggctgtccaggggcagagagaaatagtaggtccccttctggtaatcagtgggggcgctgccctggcgctgctgggacaggccattgatctccggccagccggactggtcctgcatggagagaggggagagggtgatagacgtgccgttttccaaggtgagggtcagatcctcctcgggcttgagcagtccgcagtagaccatgatttcctgatggccgaacacctgggagagctgccggcgcagcttgatctcgttgtccgcggagatcagaggggccatcttctcctgtacctgatccatggagaagccgttgacggaggtcacctgctggccaagagcaccctggtgggaggcgtccacctggtagagcacccagtccccgtccatccacttcacagacacgggaaacatatgtccgctgctgagaatagagttaagatttgtggtggtgtgggaatccccaatgagggctgccagagactggagatccagcccaaaactcatgctgtcctctgtgtctatccgggcctcgatctgagcgatgcgggcaaggaactcctgctccggcgtattggtgaaggggccggggtggcgatcccggatggtctgatagagcagctccaggtcttcctgcctgccagcctgctcctccgccgcaggggcggcaaaagtgggaatggccagggccagagaacaggccagagcgagagcggtaacggtcttggcaaagcgcatggtgattcctcccaattcttgatggtactatcctatcaggggcattttaaaggaaataaaaaatttccttaagattatatgaaatttgggacagcttcaatccgggaatccctctgtcatggcccaggcggctggaactatcatatctggttcgaatggcaggaacaagaaaaaaacaccaggtcagcgccaaatacggcgctggcctggtgtctgaggagaaatcaaaacataccggacgggttccagtcccgaatccccagcagctgattgcactggtcaataggcatgagctgatcaaaaaaggttttgcagtcccctgtctccttaaactgctgaatcaggtcggaggcggctttgcaccagcgcatcagaagaccatttggccatatgacggcccgaacccctgcctgacgcagctcttccagagtaaaacagacctcagggcaaaattccatcaggcagtacagaatgggaacctttatttgatcgcaggcccgtttgacagaatccagagtctcaaagaccccctttgaggagaaaagaaaacccatgtctgctccggcctctgctgccagattgagacgccggatagcctcatcctctccttccacctcggcggcatcggagcgggcaataactaaaaagttggggtctctccgaaaggtcagagcggtctctatttttcgaataaagacttgggcagtttcaatttggacgcccttcatgccgccgcatcgctttggcgtgacctggtcctcgaaatgcgcgccgcagattccggcggcctccaggtcccgcatagtgcggcggacattcagctcattcccatagcctgtgtccgcgtcgataagaaagggcagatccacacaggaggcaaggtcctgggcgtgctttgtctgttcacatccgcagacaagacccagatccggcacacccagcaggctggctgctgctgcctgaccgcccatgtaacagccgtcaaaaaagtcagccgcctgggcggcccgggctgtaatgccgtcgaaggctccgcagagcaccttcatccgggaggaatccatcatctgggacttaaaattggctcgtttctcctgaactgtcataatatcaggctccttttttctgaaaagccgtccggcagggcactgtggctctggtttatagccggactttaaggtgtatccggcaggacatattcgtggtgggcaatatagtcctctacctgttccaaagtaggcatggagtcagaacagctgtggcctgagatggtgatggaggaagcggcggcggcgtagcgcagagaatccttcaactccatattgtgaagcagaccaaataagaaggcggaggaataggagtcaccggcgccaaaggttttcaacacctgtgctggatagatgccacccacggtttttccttccttcgtaaaaacatgggaaccttttttcccttttttaatggagaccacagacacgcctttttccagaagccaagcagcgcttttggcgtcgtcctgatttccggtgtggagaagatgctccattacatcaaattcatcccgggttcccaggaccagatcggctttttctgcggcaagggagagatagaggctggcttccttaacggtgtcccaggtatcctcccggtaatccagatcaaaggctactgccacatgattgcgccgtgccaaagagatggcgtgaaacactgcctcccgtgccggggaatgggagagagatgtgccagagatcagaagcagcttgtggctggcgagataggactcgtccagttgggcgcagtcgatgtgcagatccgcgcagtttgttcggtacatcaggtagctgcaccggtcaggcagaatttcacccatggtcaccccggaacgaatgccggggccagccagcgcgatatgggagacatccaccccctgttttgccagatagcgggtaataaatcgtccaaactggtcatcagaaactttaccgatgtatccgacagaaaggccgagcctggacatggccacagcggtattggccggagagccgcccacatatttatggaaagtgaccgcgtcctccatgggcccaatctcattggcgtagaggtcgatggtggcacgcccaaatgcgaccacatcccgcaactttccggaatcaatgttcaggtacatggttccccacccttctgatgttcccgctccaaatattccagcagctccagcccctcttgaacagagatgccgttatgaattacctggctcaaggttttgaccaacgcggttatgtcccggtagcggaagacaaaccggccatatgtaacccctgcagcccctgcgtccataacatttcgggtcatctgcaaatattcctttacggtttcacacttcaatccgcctgcaatggcgacgcgggccggaaccgcctggaccactttggcaaaactgtccaagtcaccggtatagttggtcttgatcagatctactccgagttccgcggcagcccgggccgcataggtgacattttccacactgtactggtcagccccagtgatatgatttcctctgggatagatatgacagatcagaggcatttccgctctcagggcctctttgctgatacggccgagcattctgagctgctggtcctgattgtcaccgcccacaatgcagccgacagagaccgcatcggcccccatgagaagtccctcctccacatcggctacctggacatcttcgtcaaagtgatacacgccgaaggtggtgagcttcagcacgagggcgaccttgcccgcatagggcgcaaagcatttttctgcaatgcccttatgcatagtgatggcattgggacctccggcgaccatcttgctcagggtgtcatctatcgtatcaaggccaggcatgacaccgcgggcaatggcgtggtccacagttaaaccaaaatattttccatccgtgcctggaatcaggcgcttcaggcgtatttcctttccaatcataaagaatttcctcttttcttttgactacagagcttaacgaacagttatgaaaataggttgacaaagaaatttatatattcaggacagaaggtggtaataacaatggcaattaagccgacaccgatgaaaggaactgcctcccgcacagtatctccaaatgtagaatgagcaattttagtgctgacaaagattccaacagcaaagggaggagtcagaaagccgacgcacatatttaccagcatgatggcaccaaagtggatggggtcaattccataggtctgtgccactggcagcagaagaggggtcataatcaggatggtggcattgatatccataaaggttcccatgaacaggaagatgacattgatcatcaaaagaaaaccaacgcggctgctgatattttcggtaatcaggttggagagaaagttggaaatgcccgccaaagtcattactttgcctgcgacagcagagaaggcgttcagcagaccgatcacggcagtggaggcgccggcaatggcacagcagcgccagaaggtaatttggattttctttttatcgataatcttcagaacaaagaaatataagattccatagacgcagctgacagcaccagcttcggtaaccgtgcacagcccgccgtaaatacagccgtagatgataatgggcatcagcagagcggggatggcgtaaatagtggactttccaatctccagcagtttggctgtgggatgaaattcaactttttccggcctggcttggtggcggccgattcggaaatagttgatgataaaatagccaatggcaaaaataaaagcagggccgatggtggacatccatacgggggtgatcttggctccggaggccagcgcatacatgattccggggacactggggggaatcaggatcccaagaaaacaggtagcggccagcagagcagaggaatagccgtggggatacccctctttctccagttcaggcaccatcatttttccaatggcgctgatggtggccatagctgagccagtaagaacgccaaaggccatgcaggcacaggtcgtaataatgccagtggcaccccggacccggcctacaaaggactttacccagtcgatcagcattttggagatgccactgtattccatgataacaccggcaaaaatgtagaagggaatcgccagaagcgcgaagctgtcgagaccggagaaagcaaactgggggaccgtgaccagctggaagccggcataggccagaaccagcagggaagaggtgcccagagcaaaggataccggcattcggaacaacaccgcgaccagtgcgaaagaaatcagaaagacgagaagtgcggtaagggcagacataatttcacctctttcaagtcattgtgcggtggcctggggctcaccgccctcacggccccggaccatccactccataaacagatagacctcatgaagagcacaaagcactacgccgataaatacaggcagatagaccaggcccatggggatcctcatggtgggggaggtctgggtcgtggcccaaatggtcatcatgtaatcaaaaaacagcttgccaaacaccaaaaggaaaagaaaggtggacaaaatggaaaacaactccagcagcctgagcccctgccttcgggcgggttctttgaaatttgcaactacctgcttgaggacatcaatttctgtatggctgccctcatagaccgcataggcagagccaatataggtgagccagataaacagataccgggtgagttcctcagcccaagcagcggagataaacagaaagtaacggcagattacctcaataaaaattgccgccaccaatgcgatggtgatgagggccataaaaaaggtctcaatccccagcagaacattgttgagccgcttggctccctgaaacagggtgctttgtgatttcatggggaaactccctcctttgcagttgaaaagttattggaagagggagcctgaagctctcccgcagaaaacctcaggctccgttttagtgtatcaatccaggattatagaaaatcaactttcagacagtgttctatactcgccgctgatgatgacatccatgatttcatcaccatatttctcccggctctcctcccagatttcctcggaaatctcctgcatggcagccttcatatcgtcagaaggctgatccacggtccattgaccgctttccaggccctcctgagtcatggactccgtcttttcccggaagaaggtggtaaactcatcagaagcgagttgagcacattccgcaaaaatggccttgtcctcatcgctgagcttgtcccagaagggggaaccggcgataaagcagccgccggaatagcagtaattcagctcagtgatgtgggtgatcacatcagtgatgccttggttggtgtagttaaacacggcgttatccagcccgtccactgtaccggtctgcagggcattcagcacctcagagccggagatcatcacaggcagggcaccgcacttctcgtaaaattccaccacagattctacggagggggtgcggattttcagtcccgccagatcggacatttcagtgaccgggcggacaatgttgcctacctggcggaagccgttgcagaaggaggagattcgaatcaggccgttctccgccataatctccgctaccttgtccgcaatccagccattattatagtaggcgtcagcttcctcataatccgccaccagtccggggagccaagcaaagcccagcgcaccgtccagtacaccgtccatggtcatgtcatcgctcatcagcacatccagcgtgcccatctgaagcatctgggccatatcagagccagtgcccagagaaccagctgcaataatggaagcagtgtaacggccttccgttttttcttcaaccagctgagcaaagcgctccacatagggagcccggtccccggtgacatctgccgtaacagtaaaggttacagcgtctgcagaaggggaggaggagtcaggcgaagatgtgcctgcggaagatgtggcgcctccaccgccgcaggcggcggtacccatcagaagggcggcggcaagcagaggagcggcaagttttttgaattgtttcatttctggttctcctttcagtgtgttcattttactcttcttatctgacccgctctgcctgtgagcggtgaacagcgcttaggggtggagtagtttctgaaagacggcaattttggcgctgtcctccagcagttcagcctgatgaaagcagttctccatagtttctccaaggatcagaacgccatgagcttccatcagaaaagctgtggtatcttccgaggtgtgagagaccgctgtgagcaccttctccgccagatcagcagaccccggttgtccatctgggattagggggacatggacaagttttaatttggcggattctgtgtagagaggaagctcctgattttgcatggaccaaatcgtggaaaacacagggtgagcatgcagaacatattgtgcagaggggcggattcggtagatgccaagatgaaaagcagactccttggagggacgcagatgagggggggcatccagaacagtgccgttttcatcacagagcaccagcccctccggcgtaacagcacgcagagggatattgcttcccgtgatcagcacatgtcggccgcaccgggcgctgatgtttccgccggcagcgctgaccagtccgcgctgatagatcagtttggagtaggagatcagattttctatttgatcggagtaagattccttccagttcattggacgtcctcccagcggcacatcattttttcaagaaccggaacactgcccatgctgccgcccttcagggcaaattctctgccagtgagagcgccgtccagaatcctgccttgagcaacgccgggctccaaggcccgacctagttccagatgatttacatgcaggtggcgaaagatggcctgggaggtctcaccgcctacaatgatgagccggtcaaatacagccgattcgcagacaaggggggcgagagttccgaaacactccatgatcctgacactggtaccaggctgataggagtaccgctcaaccgcaggggcaaggatcacgttgccgtgcgccaaagcatccagagccgctgccgccgcccgatgggggacagtttgatctccctctatataggcgtctatttccacaggaaccactgtaagcccccgggactgagaatacgcaagctgttttttcgcaatttcatatgcggaggcacagaagccgaggcagcgcacttggcggactgcggccggagggaggggctgttccggcccatagagatattcggccagaccatccgcaagcccgagagaaccggtccaaaagacctttggatagagaggctgtagcgtacgaataatatgcagcgtgtcccgtttggtaatggcgtcaaagaccagaatccggcagcccctacttatctgctgctgaacagcgcccgcaagatcgccgcctttcacagtatcaatgtccacaagcccaatggggagctttgtcccgtgggaaagaatatctggaatataggattccttgggagggaaaatgggatccttagcatacagggatttggggaggatctctccctcgcagtactgatgcccatagagggtaaaggtacccagatccggcgcgttgtcaatgagaaagacgaggtagtcgggccaggcctgcagaagtccttccagctcataggaatcgttgcctcgaaaaccagtgccgatttttttcatataaatatggccagtctcttttgaaagtcttttcaacagcgcactgtggactctgcgggccacttcgccttccacgtttcgagaacacagattgacagatagaagttcattatctgatctgtttaaactgctttctcctgaggtacagattttcagctgctgcccccgggcagtgaagtagctgccggagtcggccgcacctgtcagatcatctgtgatttctgtaaagcgcatggtgttccttctccctttaaaacgtttgtttgaacataaataagaagaaataatctttgtttttgtttgataatactacctaaaatgtgcgaagtcaatatattaaacacttttttggcgtattatctagttcaatttagctatttttgttcatttagcaaaataatttcacaaaatatatgtttgatcaaacaaaaaatctccgagcaaaataccaactcatgtggtactttgccggagatcttctttcacaatatgtaactacaccaattttaagtttatttgggcgttgtttaagaaatcccgccaatccagagagagtttattatctgtaatcagcatatccatatcatgaagttcagcaaaatgattggcttttaccaaatcaaatttactggaatctgccagcatgatattttgtgcggaagaatcgatcaatgctcttttactatccacaatatgagcattgatacaggtaatgcccagactgcgatggatccctgagacagaaataaaggatttgttggcacggtgccggcgaataaaatccacagcttccggagaggtaaaattgtaatcctccggatggtaatagccgccgggaaaaatgattttaatatttggacgcttaagcagttccgcgaggatcgtaaaattataacataagactgtaaattcaaaatctgtggggagatatgaggtaatgcgccccacagtggtgccattatccaaaaaaatccagtctcctggctcaatcagcgtggcggcgtatttggcaatacggtctttttcgctgaggttttgaattcgggccagacgaaggtcataaacttctccatcataggcatagccatcgccgcctttggcgagagtcgcatagccatagctccgttccaatacatggtttttccgcaggagatccagatcccgtcggatggtcatctcagagacttcgagtgtagcggccaaatcttttacagagacccgttgatattgctttagaagttccagttcttgagcgatacggcgctcttttgcatttccattctccataatgtccttcttttcctatgccccgctaagaaccctcatacaggtgcccgggggaactggttgagttcctatgggcctattatgtgcgatcaatccgttcaatgcaacatattttcaaaaattcctcagaattcacaaatagacggcagattttttgtggattttttggatttaattacatttattggatgataaaaatttttgtaagtagagatagagatctatctactatggcttttttttcacctctatgctacaatgtgctttactgttaaaaatgtgctgggctgccgggcagttcagttaggcagatggagggatatgatgtcaggcaaagaggaatttatcgagatctttcgagagaagatcactcgcccaggggcagacgccctgctggactatctggagaacaagagcgacttttttaccgcccccgcctccgcccgataccacggggcctatgcgggcgggctgtgtgaccacagcctgaatgtctaccactgtctggtggactatctggcccgggaacgggtccaggagctgtatggcctggagtacagtgaggagagtgtggcagtggtggccctgctccatgatctgtgcaaggtgggctgctataaaaagagctttcggaacgtgaagaacgatgccactggacagtgggagcgggtccccacctttacttttgatgaccctctgccctatggacacggggaaaagagcgtgtacatcgccaacggcttcatccggctgacccgggaggaggccatggcgatccgctggcacatgggcttctccggcccggaggacgcccgcactgtggggcaggcatttcaaaaatatccgctcgccttcgccttggccacagcggacatggaggcgtcttatttcctggaaaatgaagaaaacccgtaaaaaagccccggagtgcgctctgcgctccgggcttttgaataaaaccgcctgttttggggaaaactggagcatacaagagctttgacagaaaggcggtttttggtgtgcaagtgcgtgaattgatgaaccccgctgtggtgacagtggagcccagctcctcggcggccctggcagcccggctgatcagccggcacaatgtgggagctcttcctgtgtgcggcggggacggacgtctgcgggggatcgtgacggaccgggatatcgtgctgcggtgtgtagcggcggaggaggacccggcccaggtgccggtgcgggatatcatgacccgcaactgcgccacggtctccccgggggatgactgcagagaagccacccgtgtgatggcggcccagcaggtccggcgtctgccagtcacagagggcgggaagattgtggggatcgtgtccctgggcgacctggcgaagtgtcaggcttttgacatggaggcggccaaggctctgagtgagatctcagagaatatcatccgtccgtgatcggcaacgcagagaggcacccgctgaagcgggtgcctctgtatttctgtctgagcggcgtgggatcaggcgttctcttcgggagcttcttttctggtgacattgatggagagctcgtccaactgtttatcgtccacgaagtccgggcactgggtcatgggctcgctggcgttctgaaccttggggaaagcgatgacgtcccggatggagtcggccccggccatgagcatgaccagccggtccaggccgtaggccaagccgccgtgagggggagcgccgaacttgaaagcgttgatgaggtggccgaagcgctccatggcatcctcgtcggagaagcccagggcccggaacatggcctcctgggtctcagggacggagatgcggatggagccgccgcccagctcagtgccgttgagcacgatgtcgtaggccttggcccgacagtttttcttgtcggtctccagcttgtcgaagtcctcgtccataggcgcggtgaaggggtggtgcatggccacatagcggccctcctcctcgctgtactcgaacatggggaactccgtcacccacaggaacttgaagtccatggggtccaggatgcccagctgcttggcgcactcacaccgcagggcgcccagggcggcaaagaccacctcgtccttggcatcacccacgatgaggaccaggtcgccgtcctttgccccggcccgctccaggatggcccggttctcctcctcggtgaggaacttctgataggaactggtgacctccccgccgtgcaggcgggtccaggccagccccttggccttgtaggtcttgacgaactcggccagcttatcgattttcttccgggggaagtgctcgccgccgccctccacgttgatgaggcgcacggagccccccgccgccacaggagcggagaagacctggaaggagcagtccttcacaatgtcgctgatatccttcagttcaaagccgaagcgcatgtctggcttgtcggagccgaagcggtccatagcctcccgccagggcaggcggaggaagggggtctggacgtccacatccagcacctctttgaacacccgcttcaggaagccctcctgtatgtccatcacgtcgtcctcgttgacaaaggacatctccaggtcgatctgggtgaactcgggctggcggtctgcccgcaggtcctcatcccggaagcagcgggcgatctgcatatagcggtcaaagccggagagcatcagcagctgcttatactgctgaggggactggggcagggcgtagaacttgccggggtggacccgggaggggaccagatagtcccgggcgccctcgggggtggacttggtgagcatgggggtctcgatctcgtagaagccctgctcgtcgaagtagtcccgggcgattttcgtgaccttgtggcgggtggcgatcatcttctgcatgtcggggcggcgcaggtccagatagcggtacttcaggcgcagcatatcgttggccttggagtgctccacgatctcgaaggggggggtctccgccttggccagcaggcgcagctcggtgacatatacctcgatggcgccggtggcgatcttgtccgtcttggactcccgctcccgcacggtgccggtggcagcaatgacgtattccgagcggagagaggacgccttttcaaagacggcctggtcggtgccgtcgtcgaaggagagctggacgaggccggtacggtcccgcaggtccacgaagatcagaccgcccaggtcacgctggcgctggacccagccgcacagagagaccgtcttgcccgtgtcgcccagacgcaagtcaccgcagtagttggtgcggcggaaatttttcagattgtccataaaatcaactccattttgtactattttatctaattatagtgattagtattaaaaacttgggctgttgtcattcccgaaaggtcccatacttcttcaaatattccgccagcgcctgataggtcgatccatcagcggcggtaaacagaagggagtggggggagctgggaagggagagacggagctgccctgtgtccacagcggtgaaaaagaccccctcgttcccctccagtcccaggacgccctgaaggctgctggagaagccgctgaaagaaccggcatccagccccaacaggtttttcagactggcccgccagcggcttttctccaggagggaaaggagggcatcaaaggcgggggtgccgggggaaaggtcctgaagctcccagatatcctgtcctgcttggccgtcatccacccaggactctaacagaagcagggcggcggagcagacggcgttctctgaggtcccagtgatcgccaaaaagctccggggccgggtgtaccacaggtatagagcggccagaagggctaaaatcaagaccagggagagcagggctctttttttcatggggcgcacctccttgctttttaccggcagggcgggtcaaaggacctgcgcctaagaggaagggtagtaaatgttttcctccggctcgtccataaaaatgagctccagcttctcccccaggcggccggggggaagggggagaaagcggcgccaatgagaggaattcgaggccagccagagaaaggtgccgtcccagtaggccatgcactcgggggtacagccggatgcggtatagaaggcggtcccgccgtcgggggcccccagcagggcggggaggcggagatacctctgcccccggagggcggccagcagctcacggtaagtccgcccctcatcaaaggtgacaggagcgtcactgaggccgggataggtgccctcgcgcagcaccttaaaagaacccccgggttttgcgggcggacctatgccgttgcactggaaggcatggtcgaaggtgggggccgcccaatagtgcagcaccccgacggccaggagcaccaaaacgaccagacaaaagctcaattttttcttcacaaggatccctcccgctccagccgccgggcgggattgcccaggatgtacccggcggtctcgtcaaggtcctgttggttgcggatgacatggtcatagtagccgcgcggccaaagggaaagccgctttgcgtgttgtcaaatttttagaggcttattattctgggaaggacaggcggaccagatgtgccgtccctacgaggtgacgattgcagttccgccgtattccagggccagccgttggatggctgcctcaaatccggcgggatcggtgggccgataacccaggtagtggccgcccagccagttcacccacagggttgtaccatcccacagcagggtggtctggcagtcgccagtggaagaacagccctcctggaagtaatcgattttcaccttgaccggctcccggggctggtggaggaaaggcaggagggtgaggggatcggccaggaaccggatgccttccatctcactatggagatcataaaaggcatccaaggcttcttggtcaatgccaaagctgagagaagcggtgaattctgtctcggcgcagatttccggtctttctcctgagacatttaccatccgctgaggaatgatccaggcaaagggccggggaaataccgtccacaccaaaagacaaacgattaaaagcagtaaaaagcgtttggcatttttcttcatgagcttttccctttctatatcagagacagctggcccgggaattccatctatacggcgtgggacggcccggtggggatatcggctcctgcacagccaaagcgtggatgggaaatcggacttacaccctgtccaggatcggcgtcccctggttcagcctgtccagcccggccaggatgtgggcggcagcttggccgggagcaagcttcacctgctccccggtggccaggtccttgacggcggcgaggccctcccggatctcgtcctctcccaggatgacggcgtaggggatgcggagcttgtccgcataggagagcttctgcttgaacttcttccgctccgcctggatctgggtgcggatgcctgcctggcgcagctgggtggccagggagatggcaggggccaggtcctcggtcatggggaggataagggcgtcggcgggggcggtgttcagggcgtcgttgagatagccctggtcctccagaacgaagaacaggcgggtcaaaccgatggaaatgcccactccagggagttgtttattcgtgtaatattccgctaagttgtcataacggccgccggaacagatggagccgatctccggatggtccagcatggtggtctcatagacggtgccggtgtagtagtccagtccccgggcgatggtcaggtccacggcgaagtgagtctcaggcacgccgaaggcagccagatattttgtcaccgcgttcagctcatccaggcccaggtcaaagacctcgttccggccccggtagccctccagggcggtcaggacctcctcgttggtgccagtgatggaggtaaagctgaggatctcccgggcctgctccggagagaggccggactgcaccagcagctcggccaccttgtccgggccgatcttgtccagcttgtccaccgtgcgcatgatctcgccggactgctgggaaagacccagcatggcgtaaaagccgttgaggatcttccggttgttcacccggatctggaagcgcttcagccccagggcggtgaaggcccgatagatgatggaggggatctccgcctcgttgctgatgtccagggcgccgtctccgatgacgtcgatgtccgcctgatagaactcccggaagcggccccgctgggcccgctccccccggtagaccttgccgatctggaagcgacggaaggggaaggtgagctggccgtagttcagcgccacatacttggccagggggacggtgaggtcaaagcggagggacaggtcggtgtctcccttgagaaagcggtagatctgcttctccgtctcgccgccgcccttggccagcaggacctcgctggcctcgatgaggggggtgtccaggggggtgaagccgtagagggagtaggtctcccgcaggatggagaccatccggtcgaactggacctgccgggcggggagcagctccataaagccggacagggtgcggggttgtacgtttgccatatcgattctcctttttggaatggttgggggagtcaaacaacagatcagggtgcggggtcagcggttgatgtcggggttgtcggtgcggccggccaggtagtccatggagacgttgaagtagtccgccagggcgatgaggccccgcatatcgggacaggcccggcccttttcataggagtagaccgcatattttttcagcccgatgacgctgccgacctcttcctgagagagtcctttttctttgcggagggctcggatccgctctgcgaaattggccatagttcctcccaatttttgcttgacagtagcaaatgaaaccactatactaaaagtagtttaaaatgctacttttaggggggtgacataatggagcagatatatgaaaaactgtatgaagcctttgtcccgccctgggccacgccggaggagaccgcagccggtgaggccggtgagccctattttgaccggctctgccagcgtttcccgccccaggaggcggaggacatctgggacgcggcgctgtcagcgggggccgctggcagggaggaatgcttcctccggggcttccgcctgggggccctgctgatgctggacctcctctccggcggggaaggggagcgggggacaaaaacgcgctcccgtcccctgcgattgggacgagagcgtttcaaacacttcgtggtgccacccaaattcaggcgtgcggacacgcccctttgaccctgtgttgcggcagggggaccgcgcccgtctccgggcccgctggtggcgctgtcttctccggggccgtctccgtaaggtcctttcagccgagggacctctctctgtccggcggtgtcccggatactcatgcgccgtcttggcggtggacgctgtccgcagcccgcgcgggggcgggccgggggaatggggagaacgtctccctcagatggcgaaggggatgcggttggggttcatcacctcgcgccagtccaagtctccccgggccagaccgtggatcagcagctcagcggtggccacgttggtggccatggggacggagtgctggtcacacagcttggagatggacagcacgctgtcgtccagctctccggagcgggggtcgttgaagaacagcaccatgtcgatctcgttgtagatgatgcgctgaccgatctgctcgatgccgccgtgggcgtgggacaggaacagattgacaggaagaccggtggcctccgcgaccatgcggccggtggtgttggtggcgcatacggtgtgcttggacaggacgccgcagtaagcagtgcagaattggaccatcagttccttcttatggtcgtggctcatcagtgcgatgttcatggtgtggcaaacctcctttatacagatgccggaagggagttcagcggatccgcatgatagggacccggcgcccctccagacgcttggcaatgttcaggcaggcgttggccgccccctgccgtccgcccaggatcaggggccgccccaggttggcggacagcatcacctgggggtcctccggcactacgcccagcagtggcaggccggcggtgtccatggcgtcgtcaatggtggtgcgcagctgacgcagcagcttgggctggatgcggttcatcaccagatgaatctgccgcagaaagtccagctcacccacggtgcgctgggcgtcccgaagggaagaagcgtcgttggtggagacgacgatggcccggtcggccccgcagcaggccatccggaagccggcgcccaggcccgcgggggagtcgatgaggacatagtcatacagggatcgggcggtatccagcatgcggcggacagcctcctccgtcagggcaggggagagggtcatgggcgcggtgagcagggccagacccggcagatcggggtggttcaccgccgcgcggaccagagggcagcgtccctccgccacatcggagaagtccatcagggcccggtcgctgaggcccagggagatgtccaggttgcgcaggccgatgtccatgtcgatgcacagcacgctgtgccccaggcgggccagactgccggccacacccccggtaatggaggtttttccggtgccgcccttcccggaggtgacgacgattgcggttcccatgtgtgcgcagacctcccatcacaccattttaagtgtatcacaaatcccacccacgtcaatgggtttatgagaaattttgaaaaatggagccgaaaatccaggtaaagccctaccccctgtacactgagggtatcgatcctggagggctggcggagacatcgctccggtctcacagcggggctttctggatcttggcccaccgccggggatagcccttcagggttggggccaccttccgcaggactaccagacggtgaatgacgtcggtgccgggaatggtgtagtcccggcactcctccagacgggcacccagcagcttgatgcagtgggcggcctcctccagctcccggccgcagtccaccgacttcatggccagaaaagcgccccctaccttgacatagggcaggcacagctcacacagcaggcggagctcggccaccgcccgggcagtgaccagatcaaagctgtcccggaagcccttctccagagcctgctcctccgcacgggcatggatgacccggatgccggtgagggagagctgggcgctgacctgagccagccagtccacccgcttgttcaaactgtccagcagagtgacctggagggaggggaccaggatcttcaggggcagacccggaaagccggccccggtgcccacgtccaggagggccctgttctgaaagtcggcgcaggtgagcagggcagcgcagtccagcatatggagctgggccacctttaccgggtcggtgatagcagtcaggttcatcacctggttcttctccagcaggagatggccgtattccgccagctggctggggacctgctccggcacccggtccagcaggcccagatccgccagaccggcggcaataatgtcacgcatggctcgttcctccaaaaatcagggcgccccggtgacgaagacgcccaccaggctgaaattggacagcaggcccacgatgcccagggggagggtggccagcgccgccaggaagcacaccgcagccagggcgatggcgggccatttgccagggcggccggtggtgcgccagctgaccaaagccaggatacccaggccgatcaggccggggacggccaggagaggggccatgttcaccagcatggagccggtaaagtagtaataggtcatcatggccaccaggatcaccatatagaccacaccgatccaggccatagtccgcttcaccggggaggcgggggtatagggtgccggggcgtcttgctcctcctgcggggggatctttttttcttccatcaggtcctctctttcagcaggtcccggatctctgtgagcagcagctcttcttgggagggcgccgggggaggtgcgggggtctcctcctttttccggtggaggcggttgagggctttcacgaggcagaacaccgcgaaggccatgatgagaaagttcaagatggcgttgatgaaattgccgaccatcagggcaccgcccccgggcagttccacggccatggcggccagggcggtgttgtttccggcgatgatgcccaggatggggttgagaatatcgttgaccagggaggtggtgatgttgctgaaggcgccgccgatgatgacgcctacggccaggtccatcacattgccccgggcgataaaggacttgaactcttggatgaaggctctcataagcaaaaagcttcctttctatttcttgaggctctgagatagggagcagccggagagggcgggggagagggggaaagcctctgcctctttgcacccggaaacccttgcggcgcaagggtttccgggtgcagaccgttctggagcgatttccaggggcgaaaatgatccaaagccaggggcggggatgcgctgtccgctggagacgggtaaaacaaatcgttatattccttaaaaaaattacaaaacgaaattttaaaggcaatcatcggccccattggggcacagacacgcgatatagccggagagaagagctggggtcactgcttgggagtcagcatctgggtgccgcccatgtagggctggagtacggcggggatcttcacagtgccgtccgcctggaggttattctccaggaaagcaatgagcatccggggcggggcgaccacagtgttgttcagggtgtggggcaggtaggtgcccttctcccccttgacccgcatcttcaggcggcgggcctgagcatcgcccaggttggagcaggagcagacctcaaaatacttctgctggcggggggaccaggcctcgatgtcacaggactttaccttcaggtcagccaggtcgccggagcagcactccagctggcggaccgggatatccagggagcggaacagctctaccgagtagcgccacatctgctcgtaccacttcatggagtcctccggcttgcacaccaccaccatttcctgcttctcaaactggtggatgcggtagacgccccgctcctcgatgccgtgggcccccttctccttgcggaagcagggggagtaggaggtaagggtctggggcagaaactcctcggggatgatctggtcgatgaacttgccgatcatggagtgctcgctggtgccgataagatagaggtcctcgccctcgatcttgtacatcatggcgtccatctcggtctgggacatgacgccctccaccacgttgccgtggatcatgaaggggggaatacagaaggtgaagcccttgttgatcataaagtctcgcgcataggccagcaccgcttcatggagccgggcaatatcccccatgaggtagtagaagccgttgccggagacccggccggcagcgtccatgtcgatgccgttgaaggactccatgatctgggtgtggtaggggatctcaaagtcggggaccacaggctcaccgaagcgctggacttccacattgtagctgtcgtcagggccgatagggacggagggatcaatgatattggggatctgtagcatgatgtgacggatctgctgcgccagttcagtctctttggactccagctcagccagccggtcggcgttggccttgacctgggccttgacggcctcggcctcctccagcttggaggggtcctttttggcctggcccatcagcatacctacctgcttggacagggcgttccggttggctctcagctcattggcttcgctgacagcggcccggttctcctcgtccaatgccagtacctggtccaccaggggcagtttggcatcctgaaactttttcttgatattttcccgcactgcatcggggttttcacgaataaatttgatatccagcatggggatcgcactccttttttatcttaacagaatgggatgagctcctgtggggaaattgggcgaaaataaaaatgtttcacgtgaaacctggccggcggagatgtcctgccatccggcctaaagccggtcagtacagggcgtcccagatctcctgataccggtcagcaggggagaagcggccgttatcggtgtagctctcctggggaagatagctcttcaggggggcctctccggaggaggtgtcctccagtaccgcgatcagatcacggcagagggagtagcggccccgcacataggcctcatcgatctgccagaagtagtccatggcctccttggtgcgctccaggacctgtccctgctgctccccggcggcggtcaggctgtcgatggtccccagcagggtgtcgatctgttcctggaggtcttggatctcatttttcagggcgccgttctcctccagggcgctctgggcggtctgcatcccggagagggagtccttcagatcagagactgaggaggtcaggtcccccagcgtctcattgctgcggcgctggtccatggcgtaggtcatcagcagcagggcaaaggccgctgcaaagaggatagtgatgtagagcaccaccgactgcctgcgccgccgctgctggccaggacgctcctccttgggaggaccgcctgcctggggggcgttctgcgccggcttctggggatcagccatggccctgcacctccccggcgttcagccgctccagagcctccagcagaagctccagatcctggctgttgtagtattccaactcgatcctgccttttttgcctcggtgggcgatgtggaccttccggcccaaccggccggagagattcttttccgcctccccgaggtagagggccagactgtcccccgcctgcttaggcggggccttcttttcccgctggagggccttgaccagtgcctccgtctggcggacggagagcccgtcagcaatgaccttcttggcggcctgccgctggagctccgccgtgggggcgcccagcagggcacgggcgtggccggcggagagctgttcctcctccaccagcttcaagaggtcctccgggagggccagcagccgcagggtattggtgatggcaggccgggattttcccatccgatccgccacctgttcctgggtgaggccgtattcctccatcagcacctgatagccccgggcctcttcggccgggttcaggtcctctcgctggaggttctcgatcaggcccagctccatcactttgcggtcatccgcctcgatgatgactgccggcacctccgccaggccggccagcttggcggcccgccagcggcgctcaccggcgatgatctggtagtagccggaggacagacggcgcactgtcagcggctggatgatgccgtggacccggatagactctgccagatcggccagggcatcctggtcaaagcgcttccggggctgattcaggccgggctgtacctgggaaatggggagggagacggagccctctccctgcgcttgcaggtccgggtcgcccagcagggcgttcagcccccggcccaggcccagctctttggttcgctttgccatagtagctccttccttataaaaataacagtggagatcaaaattcagccgtcggggccagacttacggccccggcgaaaaagcgggggagaactcagacaggggccgccgtggggtgcttggctgcgatctcctccgccagcagccggtaggcctccgccccccgggagtaggggtcgtaggcggtgacgggcttcccgtggctgggggcctcggataagcgcacattgcgggggatgaccgtggcgtagacctgaccgggaaagtgacgtttaacttcctccgccacttgaagagagagattggtgcggctgtcaaacatggtgagcagcacgccctctaacaccagccggggattcagtgagcgtttgaccaagcggacggtagagagcagatcgctcagtccctccagggcgtagtactcacactggaccgggaccagcagggagtcagcggcgcacagggcgttcactgtcagcagctccagagagggggggcagtccacaaagatgaagtcgtagccgggagagaggacctccagggcctttcggagcagatgctcccggtccggcagggcgatcatctccacgcccgctccggccagcgccttgttggagggaagcacgtccccgtagtgtgtggtgactacgccgcggcggggatcggccccattgatgagcacgtcgtagacatttggggaggcggtgttcttgtccactcccataccagaggtggcgttggcttgggggtcgaagtcgcacagcagtacccgctttcccagcgcggccagggcggcggtgaggttgacggtggtagtggtcttgcccacgcctcccttttgattgacgatagcgatgatcttggccatggggcgcctcctgagtcgaaatggcggacgggtgtacagcagacttccgcagagctttattatatcaaccgagggaacgcatttcaactctttttcccgtttttccggcctggtagcgagaaaaggcggcggaccgcacaggggcggcccgccgcaaggggagaggtgcagacagagggagagagccgagaccgggcctgcctccaggcgatctggcttcggcaggcgatggggaggaaaggggagataggaaaagagaatgtttcacgtgaaacatttttaccgaatggcctggggaatacggatggtgagcaggatctctccatccttatcctggcggtcacagcgggcatccaccccggcagaccgcattagggccatgctccgagtcagagtgttaagaaaaaggcggacatccttcaccacaaaggtgcgtttggttctggtgcggggaggaggggagagaagctgatctaccaaggcgtctgtctgggccacggtgagctgccgggacaggatctgctccagggccttctggcgcaggctggggtcctccagccgaagcagggcccgggcatggcgctcagtgcagccgccgtcccgcagggcccggagagtgtcctccggcagcttcagcaggcgcagcttgttggccacggcggactggctcttgccgatgcgccgggcagcctcctcctgggagagatggtagacagagatcaaccggtccagggccagggcctcctcccagaagtccaggtccttgcgctgcaagttctctaccagagccagcagggaggagcgctggtcgtcgatctggagagagatgcaggggacctcttccagtcctgccagcttggcggcccggagccgccgttccccggctaccagctcccagccgtctgcccgacggcgcacagtcaggggctggagcagccccagagcctggatggaaccagccagctcctccagttcctgggtgccaaagacccggcggggctgattgggattgggtgagatggcgtctacagggaggaacagcacccggggactgtccagcaatcccttctttcgcagcagctgcattctggataccccctttgatccttccgctgttataaaacagcttgtcttgatatccatattttaccataaaaaaataaaaagaaagttggattctgtcgcagttgtggaaaatccagtggaaaagttgaaaaaagaagggcttggcccgggaaattgcagggggagaaaaaggaaagaaagaccttgtaagtttcctccatatcatatatactgaaagagagcagtcagagagggagctgtaaacagatgcggcccaaagtgaggaaagggctgcatggacggaaaggagagctgtcaatgaacaagaagaaacttccccttgcattttggatcttcatcgggctggtggtcggcatcgcagtgggcctggccctgatgatggtgcccaacggactggacatcgcgaaaaactacattctgccctggggcacgatcttcctgaacctgctgaaattcatcgtggtgcccatcgtgctgttttccatcgcctccggtgtcatctctatgcaggacatcggccgggtgggctcggtgggaggcaagacgatcgtgtattacatgtgcaccaccgcttttgccgtggtgttggccctggtgctggccagcgcggccaaggggatgcacatctttgcggccatggagacctccggcctggcctatgaacccccggcgggccagtcgctgatgcagaccatcatcgacatcttcccctccaaccccatcacgccgctggccaatgcctccatgctccaggtcatcgtcatctctctcctggtgggcttcggcatcctgctggcgggggaaaaggggctggtggccgcccaggtggtggacagcttcaatgaggtgtccatgaagatcatggacctgatcatcaagctctcgcccatcggcgtggcctgcctgatctgcccggtgatcgtggaaaacgggcccaagatcctggctcagctggtggcggtgctggcggtggcctatgtgggctatatcgtccacgccgtggtggtgtactccagcacggtgaaggccctgggcggcgtatcccccatcgccttctttaaggggatggcccctgccatgatgatggccttctcctccgcatcctcggtgggcaccctgcccttcaccctggagtgctccgagcggctgggggcccggaaggaggtcgcctccttcgtgctgcccctgggcgccaccatcaacatggacggaactgccatctaccagggggtgtgcgccgttttcatcgcatcctgctatgggatcgacctgaccatcggccagatggccaccatcgtgctcaccgccaccttggcgtctatcggcactgcgggcgtccccggcgccggcatggtgatgctggccatggtgctccagagcgtaaatatcccggtggagggcatcgcgctggtggccggcatcgaccggatctttgacatgggccgcaccaccatcaacatcacgggcgatgcggcctgcgcagtggtggtctccaagatggaggaccgcaaggtggcccgcaccaagagtgttttgggctgatcaaagaacagagagcgggccccggaccaaatggtccggggcccgctgctttgtttgaagggccggtatgcatggaggccataggtctatgaaaaaagcaaaatagtccaacgtggggacatctgctaaaatagggggcagaagaaacttaaaattgggcagagtgctcaatatagaggaaagggtgaagagaccgatgcggatgcagggagaggaattcaacatccaggccaacggtgtggaaatccacggggtcaggatggggcagggggagccgctcctcctcctccacgggcacccggagacctgtctgatgtggcacaaggtggcgccccagctggcggagcgcttcacagtggtggccaccgacctgcggggctacggggacagcggaaagccggaggggctgcctgaccacagcaactactccaagcggactatggcggaggaccaaatcgaggtgatgcgggccctgggctttgaacgcttccacgtcatggggcatgatcggggggcccgggtggcctaccgcatggcgctggaccatccggaggcggtaaataaactggtgctgctggatatcgtgtccacctatgacatgtacagcctctccacccgggagtttgccaaggcgctgttccagtggtatttctttacccaggaggccccgctgccggaggacatgatcctgtccagccggaagcagtttttccgctattccctgcacattgcccggtatcactcggagaacgacacctcagccgaggcatttccccaggacgtctacgacgagtatctgaggcactacaacgtggaaaccatccacgccatctgtgaggagtaccgggcgggggagacggtggatctggcgctggacgaggaggatttgcgggccgggcggaagatccgggccgagaccctggtgttgtggggggcaaacggactggtggagcggttcttccgccccctggagtgctgggccaaatttggagaccacattcagggacacaacctgccctgcggccattttatccctgaggaggcccctctccccatgctggaggcggtggaaaacttcctttgacaacagacgcaagaaaaagacagcgccccgccgtggagagagtccgcggcggggcgctgtctggttaaaagaaaacatgaaaatgtcacatgaatacatgagaaagtcgtattggaagttaaaattgtttaatattacaatttgagttaacttcaaaagaaaaaagtggtcaaaagaaacaaattttcttttgggaaaattttgcacaaaattttcagacctgctgaggcctgaacgtgcagtggaagggagcggatgagagaggcacagttgaagcagaggaaaacggtgaaaggagaaatgtaaaaaatgaagcgattgtcaaagcggatcatttcttccgtgctgaccggcaccatgctgttgtcgctgctgggtggtagcgcgctggcggtggagccggaggggggcccggaagaggaagtaagatctgggcagccggtcatgagcgacgtggtgagcatccaggcttacacagaggagaccgagaccggaaatgaactgaagcagatcgagatcgtctataaagaggggacagatttcagcggactgaatggggagagctacctgttggaagggcgcggtccccaggacgaggaatttacagagatccagatccaggaagtgacagtcgacgaggagagcgctctcctcgtggttggtggcttcaccaccaaccacgatatctctgagggcacagaggaagggatggacctccgcctgcgccatacttgggaggaagaggattccgccctgtcgatgagcaggggggaaccctggctggagatgaaaaaggagcagccggcctctgaggatgagcagcctgaggacgaagaagagccatctggaccgcctcaagacggggaagaacttatccaagacggagagaagctgactcaagagggcagtcagccgccggtaagcaatggtctggagccgctggtgaattcggaagaattgaccgtggatgatatcgagagcatccaggcctttaccaagctgaacttctatggacagcggctgtatcagattgaggtcacctttgcggaaggcactgatatggaggcggccgaggaattggactataaggtctgggaccgggccttccaaaacggtgagtttgaggaaggcactgcctatattgacgatgtttcagtgagaggcaataccgttaccctgtcctttgaccaagggcctgcggataacaagccctttgggatgctctgtactgccagctgggcgattgcagaggagttcgatgagaacggggacccggatggatatgaagtatatgccggaagaagtggaaagcccttcaattactttacccggcaggagctggatctgatcctggccatcggcgcggacgctgaaatggaagacggactcagcctgacagacggatatggtcattacacgggcggagacggcgtgtgggaaaaaacagtaaacgacgtctatgatgactataagctggcctatgtggaggctgtggatgacagctactacacggcctttcaggggaaggtgcccgtccactatcaggtgcctgacagctacgacgaggatgaagggatgcccctggtcctctatgtgactggaaacggaacctcttactgggaaggcttcgatgatcagggcaatcttcaggccaacaacctggggactaatgtgacctacgacaatgctaccgaggcatggctggagctggacagtgcgatcgtgggtagccctgatgtgcactcccagaataataaggcagctggggaggaagtagcacacgccattgggtggttccaggagaactacaacattaccaaagtgatcctgattggcaattccaacggcactggaatctgttcccagaccatgcgggactttccggagctggtggatgtgttcatctgcaacaatggctggattggagatggtccgaatcggaccatttttacagagacctggcctgaggagagcctccagaagattgcggaagagggcattgcaatctgggtcatccagggtgagactgacccgctggcaaatccgatcaactctctgaaatcctatcagggattgattccctattatcaggaggcaggatggtctgacgagtggatcgcggataatcttcggatttctgccttcaaacactacaagtttgaagagtggggtgttaatgaccactcctgtgtcaaaatgagttcttggtactacatcgatgagccttatctggatgtgtacaaggacgaagatcctctggaagtgggcgagacctaccacatggaggatgcaagaaatgaagaggtccagcagttcgagtacgtgacctatgcggagagtatcagtgattgggcgctgaatgtggcaggcagtggagacaagccggcttccgaagagcccacccccattgaagacactgagaaagcggacgccagcatcggctcctatcagcggatcaatggatactttacctaccagatcagcgtaaacgacagcgcccgcggggcggacagccgggagatcgaggtctacatccctgagggagcccgtcagcgggagtactggatcagtatggcgctcccctccggcgtggacagcacggaattcctggagaagtccggctggtttgacatcgcggacgagacgctggcctgcctgctgatcatgaagcccgagaacgggacctggggcagtgcggaagacgagctggcctatgtggacgcggctatgggcaccctggtcagcagcgggacctattactccgccttcacctaccactatctggtgggctacggagacggcgcccccgccctgcagctgtgggccgcccagaaccccctgaagatgatcagccaggtctatgtggatgctcaggtggatgcggcttatgatgctctgctggaagcggccggtgagacccaggtgggaaagacgccccagcccaaccatatggatttcgaggggtacaccgacaaggacggcaatcaaattacccagaaacggacctttgaggcccagcactacaacgatatccccatccccacctggttcgtaggcaataccagcgcatccctgatcgcctattggaaggatgtcaatgactgcctttcggatgcggtgaccgatggcaattacggccaggtctactggcaggacaaggcgaattccgatgccatcgctacctccttcagcgatgtaaagacccaggtggcggtgcagagtgagtctgtctccgacatggccgaccccgcgctgacggagaacatcaactccttcctgacctactacagcggctatgacaacaactcggtgtacggccacttcatcacccagcgcctgccctacaccaaccaggacaccgacagggtgctttaccgggaccacatgtgggagggcaccaaccggacctacatcatctatatccccgacagcgtgaagtccagcggttctcccgcgcccctggtggtgaccacccacggcgccggtcagaccgccatggtattcctggaggccaccgacatcaaggaggccgccgacgagtacggatttatcgcggtcacctacgacctgaccggcaacgccgactatatgctggacctgctggagctggtcaaggacgactgtaaaaaggcgggcgtgacggtggatgaggaccggatctatggctacggtcagtccgccggcggcggagccaccgccaacactctggcccaggaccccagaactgtggagctgtttgccgcattcggcattacctccggcgttcggactacggcccagaagaacggctcacagctggtggtgcccttctacgccatttacggcgagtacgactactggcccatgaagctgggcgcattggaggctggggagtggaccggttctcagggagccaaacagtgcacctggacgaccgacacccagacctattgggcgcagcggctgctgggcaagaccctggatgagctggtggacacgcccacagtggagagcggcatcacagaggaacagatcggctcccagcaggcccccatcagcctgatcgtcaatccaactgaggcggaaaaccgctataaaaactacatctggtccagggacttcggcggcggcgaggtgcccatctttgtatggagccagtgctacggccggggccacaacctggtccccagtgacctgaacgagctgtgggaaaactggttcagcaagtgggagagaggcgcagatgaccagaccctcctgtactataaggatggtgttggtcatggaacacccgttaaggtggatcagaccagtacaggtgcagcctctgactttgacagcatcaccaacctggagaaagactggtcccaggcggctcagctacccctgaccggctggtacaccaagaacatcgacgtggacggcgacaatgactttgccgatgacgcccgcaccgtaaaggtgtacatcgcccctgaggcctccatccgctcctacttcactgtggtggctgtgccggagggtgtcgatacctatgacttcctgaaggaacagggctggatcgacttggccaacgagaagggcgagggcctgttcgtgctggagcccggcgcggggggctgggacgatgcccagaaggagagcgcctatgtggaggccgctatcgccttcctgaagagcggcaacaacatccataagcagaacgtgttctccaccttcggtgagttctacctggcaggctacggcaagggcgccgcggcgctggagctgtgggcggccgccaaccccatctttgtcatcagccaggcctatgtggacgggaccagtgccggtgcggatgctctcaccgccgtggccagcactccttatgacggaaagagctccaacggcgatattaccgatgtgctggatgagactctgaatcaggtgggcatcggcggacagatcgcccccaaggacgtgcccgttcccacctatctggcgggttacacagggagcgagaactattggcagtccgccaacgactgcgcgaccacggagaccggtgccggtgtgtactggcaggatattgcttccaaggcctatgccaccgaatacgccaacggccagctgaaggaggaaggcgcggagcacggcatctccaaggtggagatcgcggctgacaccagtgcagacgcgcaggcgatctatgagtggctgtccgactatacccgctatgacaacaccttcccctattccaacgccattgcccagcgtctggactacacctccgcccgggtagctgcccagcaggatgccaaggacggccaggtgaaatccactctgtccgacggcacccagatctggggccaggaggatataaagatcgccggtcacggcaccgttcaggcaggcgtgatcgcgttcagtgacaacagcggcgacgggaaatgggacccccgggagtatatcctgtatatccctgagggctttgagggcaaggaactgcctatcctgatgctctatcccggcaacagccagactgactccatctttatggactccaccctgtggtggcagctcgcggagaaagagggcattgctctggcctttgtgtgcgagacatacagttccagtcccagcagtgtgtcccacgccgactccgacaagttctatcagtctcttgtcaccttgatggaggagaagatcgacggcagctatgccgacctggacttcaaccggatctatggttccggccagtctgccggttcggcggcaacccagggctttgcagtgaccaatcctgagttctttgcggcagttggctctacctcagcggcagctgcagaaaaagaaaattctgcctttgagaccattccgaccatgctcattgcaggtcagatggacctgggggatatgcccaagggctttgaatccacctctctgcagaactgggctaagtatatgctgaaggccaatgggatcgataaggagttcacggccgaagatgcagaccagcacttcagcgctgacagccgtcatccggatgtgtacagctggacgaagactatcgacggtgtggatgtaccgttggtccagtgggctctgtgcctgctgcgtccccacaactgctatcccagtgatatgcccgtcctgtgggacttcatggagcacttcagctttgtgaagggcagcgatggctctctcacccggtattacagcccctccgcctttgagaaaaatgacgcggtgaagatcgactatatccccggcgcagtgaccccggatgacgatgacgatgatgacgacagcagttcctccagctccagcagatacaccgtttctgtcggcgccggcagcggaaaggggaccgtgtccgtcagtccccaaaatgcatccgagggcaccagagtgaccatcaccgtgactcccgcctccggctatgaggtggacgacgtcaccgtgaccgaccgggacggagacgatgtacgtgtcaccaaacagagcgatacccgctatacctttaccatgcctgactccaaggtagaggtggaggtcagctttgtgaagacaggggagacggtacaggagcctgataccatgaccttctccgatatcaaggccggagactggttctatgatgcggttctctatacctatgagaacggactgatgtccggcactggcgccgctgccttcagccccaaccagaccctgaccagagccatggtggcgcaggtcctgtacagcatggagggagctccggctggtggaacatccacctttaccgatgtggctgcgggcacctggtatgccagtgcggtcaactgggccgctgccaacggtgtggtcagcggctacggagacgggacctttggccccaacgacaacgttacccgggaacaagtggcgatgatcctgtacagctttgccaagtccaagggatacgatgtgtccgagaaggccagcctgtcttcctttgccgacatgtccagtgtcagcacctatgcacaggaggctatgagctgggctgccggcgccggattgatctccggcatgggcaacaacacgatcgtgccccagggcagtgccacacgggctcagtttgcagttatgctgatgcagttctgcgaggagatcgcaaaataacagaaaatagcatacttattgtaattgaaaggctattaaagtacaaagaggattattgaaatagcagcacggcggccggcgtcaggcatctctggatgagatgtgttgactgccggccgc

SEQ ID NO: 13507 - DNA, 343 bp, Unknown
  gut microbiota DNA sequence
ggtacactgcatcatggatgagtggccaaacgtggcgctgccggatgattttgacaagcttctggcaaccatgaggtcgcgcgcaatttcctgcagcatcatcatccagaacattgcgcagatgaaagccttgtttaaggatagttgggaaagtctcatagggaattgcgatgaatttttatatctgggcggcaatgaaaaagaagggcataaatatgtctcggaactattggggaaagaaacactggataccaatacctatgggcagaccaagggaaggagtggaagctattctgtgaatttccagcagtccggaagggaacttttaacccccgatgaagta

SEQ ID NO: 13508 - DNA, 347 bp, Unknown
  gut microbiota DNA sequence
cagtggcatggtttgttgtctgtctctttttcatttcatttcttttcttcaatggcattcctccaatcaaaaagactgctccctgccgaggatctcctcagctgagagcagttcataatcatccagtctcctggtatcaatggttacatcttcatgggacaggggagccttcgcataatcataaggcggcgcccctccgtcctccgtatatttcacattcacatgtttatgcagatcatatttctcatccagaatggggcgttccccacgcaccagaagcactgccttccggttatctaaaaggcgtacttcatcgggggttaaaagttcccttccggactgctgga

SEQ ID NO: 13509 - DNA, 67259 bp, Unknown
  gut microbiota DNA sequence
cgcgggagatctcccgcggccctccggtcccggggcgtcaccgccccctctttttttcgcgctttttctgctggcgcagacggaaccgctcctcctccgactggaggcggcgctgccgccgctcccggcggagccgttctcccgcctgctcccgctctctggccagggcctgctgggctctggtgccagctccggagctctccagggtctttctggcctcccgccggacacgctttgggttttccggccggactctggcccgctcccccggagcggcaggactgaaccgcagcttgtgccactccacccccagccactggtagatctgggcgtcggagggctctggtccaaagactacccgggcggcctcatagccgtccgccgtccaccgctccgcgatccccacccagaaggggggctgaaagcacaccgtaaagctgctcacgttccggtccatattcgattcctcccaaacacttgtgtcgggaaacggacgacccgggagggagggctactgacgggagcgcggcccgctcatggactaccaaccatgatgtgtttttattcccgcaccgccattgtaaggcccaggcagcggttcgtcaatggcttttcattccggccggaacgctcaggagtggccgccggtgtctctctccagcagcttcttcaggtcccccatggagacatccatcctgttggacacttcttccatggtcatcccgctgcggaggaaacgccggaccaccatgcccatgtcctcccccacctccaccaggtgcccgtccaaatcataaaagcggaccacccgctgtccccagccgtgctccaccacgtcccccaggcgctctgccccggggtatcgtctcagctgctccagaaaatggtccaggtccttcgtctcaaagcaaagctccatgttgttgctctttttcccgatccgctccttctgcagccccaccagccagtcaaactcctgctggagggagagcccgcaggtaaaggatacgttgatcccatagtcctggcagacctccaatccgaacagatcctcataaaatcctctggcggccttgacatccgccacagagagcaccactgccgtatatttcatctgtcccgctccttttctgtattttccgtcaaaaaaaagctcagctgccggtccccatagtcccgggtggctgcggagacgatctgctccatacggtaccgcatgcccaactgaccgcacctgcgagagaacacctcccacagccgtctggccctggggctggcgcaccaataccggtccccgtacctccggaggtagcgggcccgcagctcctgcccggggaaggcgtcctccagcccctgtaggaaatactcccgctggccctcccgcatggtcacgccgagggctgggtagacaaaagatgcccctgcctccgccgcccgctccaccacctccagcacattctcttccgtgtcctccaggaagggcagtactggcatcaggagcaccccggcaaacagtccccggtccgccagctcccggagagcggccagccgccgggagggggagggcgccccgggctccagccgggccgccagggcgtcatccgtggtggtgatggtgagcttgcagatcaccggcgagtgccgggcgatggagtccaaaatgtccccgtcccggacgatcaagtcgctcttggtcgcaatggccgccccgcactggtaggcgtcgatcagctccagggcgtgtcgggtcagctggagggacgcctcaaaggggttgtaggggtcgctcatggccccggtagcgatgaaggcgggccggaccttccgtgccaagtcgtcccgcaggatgcgcagggcgtctgccttggcctttaccgtatcaaagtccgggttttgatagcaggcactgcggctgtcgcagtacaggcacccgtgacagcacccccgatagatattcatggtgtgatccgtcccgaaccaccgggtgtcccggctgcggtggagcagatgtttagccggaagatactccatctccccacctcctttcctattttcaccatagcatatccagatcgctccgtcaagaggaatcgaacaaaggtttgacttccatggcccaaagggatataataaggacatcctaataaggggggagcgcccggtggaccgtgtcatctttcactgtgatctgaacagcttttacgcctcggtggagctgttggaccacccggaactgcgccacctcccagtggcggtgtgcggcgacccggccagccgccacggcatcatccttgcaaaaaacgagcctgccaaggccttcggtatcaagaccgcggagaccatctggcaggcccggaaaaagtgtcccaggctggttctccttcccgcccaccacgacaagtaccgggagttctcccgccaggtaaaccagctctatcaggagtacaccgatctggtggaacccttcggcatcgacgagagctggctggacgtcactggctctctccacctcttcggcggggaccccctggccctggcccaccagctccgccgtcgggtgcggggggagctgggcctgaccatctcggtgggagtctccttcaacaaggtgtttgccaagctgggcagcgactacaaaaaaccggacgccgtcaccctgatctcgccggataactttcgtgccctggtctggcctctgccggtgaccgacctgctctatgtgggccgggctgcggcagacaccctgaagcggttcggggtgcggaccatcggcgatctggcccggtttgaccgggaagccctgttctccctgctggggcgccacggcaggcagctccatgcctacgccaacgggctggaccgcagtcccgtctcttccgcctgtcaggagaacgcacccaagtccattggcaacggccttaccttcccccgcagcctgtccggccgggaagagatctgctccggcatcgccatgctgtccgaccgggtggccgtccgcctgcgccgggcagggatgaaggctgccggcgtctctctggccatccgggacccggatttccgggatatcagccgccagcgccggctggagccccccacctgcctggcccgggagctgtcccaggccgccgtctccctggcggagggctgctggaacatggacagtcccgtccgtgccctgacggtgaccgccctctatctgatctccgaggaccaggctggcgtccagttggacctgctgggccaggcagacgcccccaggcgggaccgcctggaacgcctggaccggacgctggaccagattcgggccaagtacggccggaacgccatctccccagcctcctccgccggcgtgtgccagggcggtgtgcaggaggaagacgaggaaggcgcaacctcctgaccggcccggaaccgctgtccggcatccgcgaaagaggccgccgctatgcggtttcccaaggagtcattggatcagctccagcagctcactcacattcaggcagaggtccggcctttcgctgccatacaggggtgctccgcaaggaattccaagttttgtttcatggaaggccccttttataaaaaggggccttgtctttcatactcataatacgatcactttttcctccggcggtacaggaccaggcaggcggctatgatccccgctgtcagtccggcccatacgaagttcagaccgttttggtccagccaaccatacaggacagagcccgggtagatcccactgaagagcgtcatcagcacagcgatcaatatagcaatcagaagcattttaacagccatagacacgttctctcctctctaccggcgtccccctccgcggggaaaatgcgccttcactctctgactctcccatctccggggctttccgttctctctgcttcgatcatatcagaaagggcccggcatgtcaaagagacatgccgggccctctgtctgtgctccagtctcaggagacggtgtactctccccgcaccagcagcttgacggtggcggcggtggcctggactgtccggtccgcgatggtggccatgtaaaggtggttggcggtcagcgcgccgccgttgttcagcgtccccccggtgcttacgtcgatcagccccgggtccgtgttggccgccagggtggcggtgcccacccgcagcatcacctcgcatcccacccccagggccagcgtctgcccggaggtgagagtaaccacggagtaggaggcactggtccccccggaggccccgccgccctccactgccatcttatagtccgcgatggcggtattgagctgagccagcagctcactctgccgcttggccgcctgctcgtccacctgcttgaggatattgggggtgactgtctgggtgagatagctgagggtgaccagggggtcggactcatctccccccgccgccaggaccgcgccgccgcagaggcaggcaccggccaggcagaaggaggcgatccgcatgctccatttcttgttctgcttcatcctatgtactccttttctgctcccccgcagcccggccggggccgggccatgggggaacgccttcgtgttccgcgccgccccagagttccgggacgggcgcacttttataccatcgtgtctggatgaaggccaaagctcaccgcgatggccgtgtctacctgcttcatcatcgtttcgtccacccggcccatgtgctcccgcaggcggcgcttatccagggtgcggatctgctccagcaggaccaccgagtccttgggcaggccgcagctcatggcggccagggagatgtgggtgggcaggcgcgccttgccggtctgggaggtgatggcggcggcaatgacagtagggctgtgccggtttccggtgtcgttctgcacgatcagcaccgggcgcacgcccccctgttcgctgcccaccaccgggctcaggtcggcatagaaaatatcgcctcgtttgactacactgttgtccacgtgatttcacactccgccggaagataatacggcgttacagcggaccggcagcggtctttatgtaacgctgtattatgattttcccacggggcggcaaggtttatacatgcagggaaaaaactccgcagcccctgcccggcggcgggcggcggcccgctgctccataccatcttatgcggggcagctgggatcggtccctgtcactcccccccggcccgtatagatccgggggaccctggggttcacgttgcacagcagctcataggggatggtgcccgccagcgcggcggcctgctccagcagaccctcccggccatagagctccgccacgtccccggggaccgcgtccgggacatctgtcacgtccaccatgcacatgtccatgcagatacggcccaccacggggcagcgccggccccgcagcagcacctccatccggttggagagcaggcggggatatccgtccccatagcccaccggcagcacggccaggcggctgtcccgctccagccgggcagtgcagccgtagctgacacaggtgcccgcaggaacggcccgcacggcggccacccgagtcttcagcgccatcaccggcagcaggccggagctgtccagtccctccagtcccggcgcgggataatagccgtacagggcgatgccgggacggaccatatccatatgagtacaaggatagtttaacacggccgcgctggcagcacaatggcaaattttgaaccggacccccagcgcttccagagcctgcctggcatccaggaaacgggtgaactgccccatggtatactcctcgttcccgtcggcgtccgcaaaatgggtaaacagcccctccgcctccaggccgggcagggcgcacagcgccgcaatggcggcggcggtctcccgctcacccccctcccgccagagaaagcccagccgggtcatgccggtgtccaccttcacgtggatcttcagcgtccgtcccgcagcctgtgccgcgcgggccagggcccggccggtctccaggtcggagacagtctgggtcacatcatgctccagcagcagctcggccagctggggcggcgtctgccccaggcacaggatggggatggtcacgccgccgcggcgcagctccgccgcctcatccacacaggccaccgccagcatatcggcccccagcgcctccagcttccgccccacctggagggccccgtggccgtaggcgttagccttgcacagccccaaaaagcggcagtccggagccagcatggcccgcagagtctggtagttatgggccagacggtccagggatatctccgcccaggtcctcatttgcgcggtctctgtcatggtaaaacctctattccttggtaaattgagaaaattcgcattggagcacacacaccccatcctgggagatctctccccggaccagggcgtgggtggcggcgtcgaaccacagggtggtctccgtcccgctgccctgtttctcctccgggtcccggctcaccacccgcagggcctggacttcccccagctcctccaggacacaggtgtccagatagccggaccgagcggtctccagcagggcggggatggcccccatgggggtcagtccgccgggagccagctctccggtctccaggatggctccatcgtactccagccagccctcatcctcttcgatccgggccgtcaggccggccaccgtctccggcgcggtcagggtgaagagggcttcctccccgttcaccgcagccgacagctcataccggtagacccgctggccataatccgctgtcaccacggcctgggccgcgcaggacgtcatagccagatactccccccggatggtgagggcgagctcctccgcctcgctgcctcccccgcctccgccgcaggcggagagggagagggtcatcatcagtacgcaaatcagcagggatctccgcaccgctccgacctccaaattcaggatccggaccggacgtgggcctccagggtctcaggcagccgctccaccaggtccccgggcgtcataccgtactcccccaggctgccggcgcagcggtccccggcctccccgtggagatatacgccgtcccgggccgccagctccggctcccacccctgtcccagcagggcgaggatgagtccggccagcacgtcgccgctgccccccttggacatgcccggattgcccgtggtgttgatccaggcccggccgtccggggcagcggtgacggtgcggtgccccttcagcaccagcacacaccggtggtcccgggcaaagtcccgggccgccgtcagggggtcctccagcggcaggggccgcccggtcagccgggcgaactctccggcgtggggggtcaggatggtgggagcccttcgtccgtccagactatctatatgcccgtccagcgcgtttatgccgtcggcgtccagcaccaccggcaccttcaggtcctccagcagggaacggaccagccgctccgtccggggcgcccggcccagtcccgggccgatgagcaccccttcgcaggacgacgcccgcctcaggatatcctcataccgcgccggcagggggaagggcatggcctccagacacttcaccgccgcgatgggccagatctcctccggcacgcccagggacaccaggcccgccccgccgcgcaccgcgccggaggcggccagcaccggggccccggtatagcccacgctccctgccaggatcagcacccgcccgtagtcccccttgtgggagtcccgctttctccggggcaggaccacatcctcatatcccatcacccccaccgggaagagcatctgtgctccggggccgaagatgagcctgtgggggatgccgatgtccgctactgtgaccagtccggcacaagaggccccctcccccagatagaggccgggctttgcgcaggtgaacgtgacggtccggtccgcgcggacggcctcacccaatacggcgccagtgtcggcgtggaccccggaggggatgtcacaggacaccacccgcttcagcggggaccttccctgcatcaatcgcacagccagaagggcgtccccctccacagggcgggagagccccaccccgaacagggcgtccaccaggcagccgcacagagacaaccacagcatctgccggcggtcctccggccggaactcctccagcacgcctccagcttcttccagctttttctccatggcccgctcgtccggcgtcatcttcctccggtcccccaccaggaaggcccggacccgaaagcccatgccccggaggatgcgggcggcggccacgccgtccccgccgttgttgccggggccgcacagcacccccacccagggagcgtgattctgatttttctcctccgcaagggcctgaagggcctccagctcccgccggtcctcctccgtctccgcccctgctcccaggaccgtcacagagtcggctccgccgatgaagtccgggccgccgccctccagcagcccccgcacctcctccgccaccgcctgggcggcccgctccatcagccccagcgaggagaccccatattcttctatggcctgccggtccagttccttcatctgggcggcgccagcgatctgatacacagcctattctcccctttccagtgcctccggggccagttctgagagcggaatcagccggatctgtcccgccgcctccgccttggaggggtacaccctgagccctggggctggctcccacatctcccggacctcctcccccgccagcaggcggctggaaaaccggcccatgtcctctgacactcggaaggcagtcccctccggggtgacgcagtacacaccctcccccagggcctccgagcggccgtaccagttgccatcccggtcccgggccgacagctccaggccggggaccgcgaagaacgggagttccgggagctcctcatcctcaaagaaaaagaataccccagcccgctctgccatctcctgatactggggcacctccgcccgaatctcggcctgctccgtgcggatcactgccccggcgggaaggatccgcaccttactgctgatgagtcccagcgcaccggactggtccagttccaccaggtcaacataaatggtcctcacggcccgcccccctttacaaaggatttttccggtattgtaccacattccggcggaaaaagaaagagaggacgtctccgtcctctctcccgtggtccgtttatttcagaaaaccgttgacgatctgctcctccgcctctttctccgtcaggcccagggtcatcagcttgatgagctgctccccggcgatcttgccgatggcggcctcgtggaccaggctggcatccacgcagttggcggtgacctccgggatggcggccaccacgccctggtccatgatgatggcgtcgcactccgagtggccgtagcaccgggcatttccgttgatgcgggccaggaacacctgcctggactggtccttagccacagaacgggagatcacgttggtgtggcagtcctctccgtccaggtccacagtgaagtcggacttggccagctgcctgccgtgggtcatcaccttctccctgatgatgagggtggcgcggggccccagcttggcgttggtggtgcgcacagtggagtccacccccttgatctgggtggtctccatctccatgtagctgtcctcgtccatctccactacggtagtggggttcatgatgttctccccccggccgtccccctcgccgtagtggcgctccacatagcgcaccttggagcgcttgcccacatggaaggtgtggatgccggagtgctccgagttctgcaccccgcagttgtggatgccgcagccggccacgatggtcacgtcgcagtcgtctccgatcaggaaatcgttatataccgtctccgtcagaccgctctcgctcagcaccaccgggatgtggaccgactggtttttggtccccggcttgatgatgatgtcgatgccgtccttgtcctccttggagacgatgtcgatgctggcggtagtgtttcgggccgccgccttgccgtttgcccggatgttataggccccctcgggcacctcgtggagcccggccacctgctccagcaggcttttctggatcgcgtccatctctctgctccctccttaccgcactttttccgacagggcgctgcacacgcccgggacctctcccagcagctggggcagcacctcatcccgggtcccctgggtctggatgcgcccgtcggccagcacgatgatccggtccgcaatgtccaggatacgctcctggtgagatatgatgataatagagccgttgatcttctcgtgcagatgctcaaacacctggatcagattgctgaagctccacaggtcgatgcccgcctccggctcgtcaaagacagacagcttggtgccccgggccatgatcatggcgatctcgatacgcttgagctctccgccggacagagatgcgtccacctcccggtcgatgtagtccttggcacacagccccacctcggacagatagccgcacgcctccggcaccccgatctgcttgcccgaggccagggtgatcaggtccttcaccgtcaggcccttaaagcggacaggctgctggaaggcaaagctgatccccttctgggcccgctgggtgatgtccagcccggtgatatcctccccgtccagcaggatgcgcccctgagtgggggtcaggatgcccgcaatgaccttggccagagtggactttcctccgccgttgggccctgtgatagccacgaaccgctcgtcgatggtcaggctgatgtcccgcaggatgttcttgctgtcgccgtcctgctccacgccatagctgatgttttgtaactctaacatgaggttcctcccgcgtacaggcccggacctgctccgaccgggctccgctttctttctatcagtttgccccgggactccgctcctcaaacggcgctcagccccttctcgccaggatctgcccctattctagcacgttctgctccaaatgtctaactgtattttttctgaaaacagaaattttcctattattttaatgggtaaaacaacgaagcggcccgtctccggcatttccccccgtatttgtcaagaccgccctcgtgagagggcggtcttcagcgctgttcagctgttggtccgggaatgggcgcccaccctggggggcgcctctccctcctgctcccttttctgatgggagacaatccatcagaggatgtcgatatactccccgctgagggccttgttcatggagcgcacagcacagaacttgccgcacatggagcaggtgtcgtcatgctcgggggagcggtcgtcccggatggccttggcagtctccgggtccagggcacaggcccactgggcctcccagtccagggcccggcgggcgtcgcccatcttgtcgtcgatgtcccgggcgccccggatgccctttgcgatatcggcggcgtgggcagcgatcctgctggcaatgatgccctgcttcacatcgtccaggttgggaagcgccaggtgctcggctggggtgacatagcacaggaaagcagcgccgctcatggcggcgatggccccgccgatggcagcggtgatgtggtcatagccgggggcgatgtcggtgaccagggggcccagcacatagaagggggctcccatgcagatggtctgctgcaccttcatgttggcggcgatctggtccatgggcacatggccgggcccctccaccatcacctgcacgtccttctcccaggcccgtttggtcagctcgcccaggcggaccagttcctcgatctgacatacatcggtggcgtcagccaggcagccggggcggcaggcgtcgcccagggagatggtcacatcgtactcccggcagatatccaggatctcgtcgtagaactcatagaagggattctcctccccggtcatgcacatccatgcgaacacaagggaaccgccccgtgagacgatgttcatcttccgcttgtgcttgcggatctgatctatggtcttacgggtgatgccgcagtggagggtgacgaagtccacgccgtcctgggcatggaggcggaccacatcgatgaagtccttggcactgagggtggccaggtcccgctggtagtggatgacgctgtcatagacagggacggtgccgatcatcaccgggcactcggcagtgagcttctggcggaagggctgggtgttgccatggctggacaggtccatgatggcctcggcccccatattcaccgcagagagcaccttctgcatctccacgtcgtagtccttgcagtcccgggagactcccaggttgacattgatcttggtgcggagcatggagccgatgccctccgggtccaggcatttgtgcaggcggttagcagggatggccaccttgccggccgcgacgaggggcatcagctcctccacggacatgtgctcctttcgggcgacagtctccagctccggggtcacgatcccccggcgggcggcgtccatctgtgtggtataattgcgttccataaagatcttctcctttatctattgattcctatttcatggatctcggtcatcaggcggaccgcccctcaccttcctccggcgggggactgaagggaccggatgcggtccaggtccagctccgggatggaaaagaggtggtccagggggccgctgcccgcccccaggtcaagcatggaggacagcgcccccgagagatagatcttcgcccgctccaccgccgtctccaggtcgcagccctttgccagattggaggcgatggcactggagagcgtgcagcctgtcccgtgggtgttggggttatggatccggcgtccgcagaaccatttgcagctcccatcctgccacagcaggtcgttggcgtcgttcaggtcgtgcccgcccttgcacagcacagcgcagccgtaccgctccccgatctcccgggcagcccgctccatgtcctccggaccggagatggtgaggcccgacaggacctccgcctctgggatgttgggggtgaggacggcggccagggggagcagctggctcttcagcgcctccaccgcttcctccgaaatcaggcgggacccgctggtagcgatcatcaccgggtccaccacgatgttccgggcctggtactgcttcagcttgtccgcgatgacctggatcagcccggtagaggacaccatccctgtcttgacggcatcggggaagatgtcggtaaaaatgcagtccagctgactggccaggaattccggggtggactccaggatgccgtagacgccggtggtattctgggccgtcagggcggtgaccgcactcatggcgtagacgccgttggcagtcatggtcttgatgtcggcctggatcccggcgcctccgctggaatcgctcccagcgatcgtcaatgctgttttcatcagaaaactcctttctccgcattgaagttttgttccgcgacaccaggtggtgcccccgaggtgccgcgtcgtcggagcaaagtacgctctgttcgggacagcctgacggccatccctcactgcgctcccttcctcctctccgggccgcacccgctccgctgggctgcgccccggctgggcggccttacggctgcccccatttttgctgtgttcgggacggtctgacggccatccctcactgtgctcctctgcccctcctctccgggccgcacccgctccattcccggctcagccccgctccaatgctgccaggaaatccggggagtccagccggggaagataccagtcgcagaggcaccgcagtgcctcctgatcctcctcggcggaggggtcatacacccccgccaccagaaagcccgcccgtttggcgctgcgtgcggcatggagggcatcctcaaagaccaccgtgcgctccggcgcgctgcccaggctgcgggcagcagcccgatagaggtccggtccggtcttaggcccgtactgaagggaactgaaggcgaacaggaagtgcttccacagccccagacggaccatggcgtcccgtgcctgaaaggcctcgctggcggtggcgatgccgcaggggacccccagggctcccagccgctccagcagtgtgtccgcccccgtcttcatggggaccctgtcccggtattcccctgtcaccagggcgttcaccccttccatcacctgttcgggcgtacaggggaggcaaaatgtatccaccatgtactccgaggcttcccgccgccccatctcccggatgtcccgggccaggtcctccggcggctttcctccaaacttccggaccagagccttgggcgcctcgttccagatgtacatggagtcggtgagggtcccgtccagatcgaagatggccccctcgatcctcatgggcccaccacccgctccacctgggcccggagggagcgggtggccgcttccacgtcgggctgggcgtacagggctgagaccaccgccaccccggcgatgccgctccccgccagctccgccacattgccggctccgatgcccccgatggccaccacagggatatccacggcggcgcagatggccttcagggtgtcatagctcactggtcgggtgtcctgcttggtcccggtggggaacatggctcctacccccaggtagtcggcccccgccgcctgggcggccagggcctgctccaccgtgcgtgcggacacgccgatgagtttgtcttcccccagcagggcccggactcgccccgcctccatatcgctctggcccacgtggacgccgtccgctcctgccgcctgggccagttccgcatcgtcgttgaggatcaggggcacgccgtagcgcccgcacagctcccgcagttccagggcctgggccagaatgctcccacggtccatatgcttctcccgcagctggatcatggtggcgcccccccgcagggatgcctccacctgttgggccagggtcctgtcccccagccagctccggtccgttacgccgtagagcagcaaatcctttttatcgcatctcatagttggctcctttctccagcgccgcgccgtccatccggcacacagcgtcaatgatccgatcccgataggtagcgtttccgtcctgaggggacatcctcgcccaggccagctcccccgccactcccatggcgcacaccgcggcggcggccgcctccagggggcgctccgggctggcggccaggcaggccgcagtcagggcggacagctgacagccggtaccggtgaccagccccatctccgggcggccgttgcggatcacgacgcactgctccccgtctgagaccaggtcaatggccccggtgaccgccactacggtcccggtgcggcgggcggtccctttggcgaaggccaccccccgctccagttccgcttccgtcactgcgtccgccccgccggcgtccaccccccgggtgtgctcctggccgcccgccagggcccgcagctctgagacattgccccgcagcacggtaaaggtgacacgggccatcagctcctgggccgtgcggagacgcagggcgctggcccccacccctaccgggtccagcaccactgggcggcccagctccccggccttgaccccggcccgcatcaggctggggatggtgcgccggctgggtgttcccaagttgaggcacagtccggcgcaccgggccgtgatctcctccacttcctccggctcatcggccatgatggggctggccccgcaggccagcaggaggtttgccacgtcgttggccgtcacatagttggtgatgcagtggatcagcggcctccgctcccgcacccggtccaggcaggctcccagctccatatccctctctcctttgtccgcagacagcaaaaaccgcggggcaccccacttcgggatatccccgcggcctagttccgcaagtatatttccctacgttggcattacccaaatcaggtcacaggtcggagcgaacagctccctctcagcccgtcatgcgagctcccttttcgtcatttttctctgctgtcgtttttcttattataagctctgtgtcccgttctggcaagagcaggaacttgtttttttcacataggtcgttgcaaaaaatcactgtttggaacaaatgtcttattttgctcctgcttgttcctgtttctcccaggccggccccgggtgcgtaacaaggcgttcctcccgccaaagggcacaaaattttttgctttactccaccatgttgtcctgtcctttgcaaggcagtggtctccgatcacccggtttttttcaaactgccggagccatcccctggcagttcccggcgcagaagagacgtggaggcccttgagaagcaccggtctctgtggtaaaatagagacgagatgcagggactctgcctgtactgaccgtaaaggaaaccacaggtctttttcacgctctgttttataatatggccctctctccttcacattctgtttttcccccagagcgatgtctccctttgcggtccccgccggggcattccgcagcaccggcgcttcccgctttccggatatccgccacagaaaggagcaaactatgactgatgctgagctgatctccacggccgtctccatgcaggagcgggcctatgtaccctattctcattttcccgtgggcgctgccctgttgtgcagtgacggggcggtgttcaccggatgcaatgtggagaacgccgcctacggctccaccctctgcgccgagcgcacggcgctggtcaaggcggtgagcgagggccgcaccggcggcttcaccgctatcgccatcgccggccggggaagcgacttctgctggccctgcggtgcctgccggcagatgctgtttgaatttgctccccagctccgggtcctggccgtccgaggggacggtgccttccagtccgccccgctctccaccctgctgccctgcggcttcgggccgggctcccttaatttttgaaccgacggaataaaaagctctcttttggccaaactacctccggaataccaatgcgaggaggtatgaaccatgataatggataagatcgccctgactctgctgatcatcggcggcctgaactggggcagcgtgggtctgtttcgattcgacctggtggccttcgcctgcggcggttccggcagtatgatcagccgcgtgatctataccctggtgggtctttccgccgtgtggtgcatctctctgctcttccgggacaaggaccccgtggaggagcggagctgaggccagtccaccgttccattcagaacatgtgatattccaaaccggccgccggaagtcccggcggccggtattttacatttttactctctgattttaccgcactttacgcagatttaacatatccgctgtttcgcattttacatttcttttttatactgagccctgtactccagatgaaacacaaaacgaatgcaataaaggagaagatcttacatgaaaaaactgacttgcatggggctgtctctggccctgatggccggcctgctggccggctgcggctccaatgggaccacctccactcctaccagcacccccgccgccagctccacccctgtccaatcccagaccaccaccctcagcggcaccgtgaacacagacggctccacctccatggagagcgtggtcaaggccctggctgaggcttttatggagcagaaccccgatgtgaccgtcaactactccggcactggctccggcaccggcatccaggccgccatcgacggcaccgtggacctgggactggcctcccgtgccctgaaggacgaagagaagagcaacggcgccgtagagaacatcgtagccctggacggcgtggccgtggttgtcaaccccgagaacggcgtgaccgacctgaccgtggagcagatcgcccagatcttcaccggcgagatcaccaactggtccgagctgggcggcgccgatgccgagatcgcggtctttggccgcgaggccggctccggcacccggggggcctttgaggagatcgtgggcgttgaagatgcctgtaagtacaccaacgagtattcctccaccggcgacgtcatcggcaacgtggcctccaaccccaacggcatcggctatgcctccctgtccgccgtggacgacaccgtgaaggccgtggcggtcaacggcgtgaccccctccgaggacaccgtgaaggacggctcctatgagatccagcgtcccttcgttatggtcaccaaggagggcacccagctctccgaggcagcccaggctttcctggattttgccatgagcgctgacgccgctgagatcattgctgttgccggcgctgtgtctgccaacgcctgagctcacccgatccaattcaaaacaagcccccgagcccgggggcttgttttgaatgatgtctccccttctgccccctttcctcagttgacacacaggcacggcccccgcgcccgtgtgtcagctgaggagacagaatctacaagaaaaggttgagtactatgaaaaaagagcatcccggcgtccccggcgggggcgccctccgggccaaagaggccatggagctgattatgatgattgtgtttctggtctgcggcttcatcgccatcgcctttgtcctgctgatcaccgtgtacctgatcatctccggcctgcccgctatccgtgaggtggggttgaccgacttcctcttcggaactcgctgggcctccaccgacaagaccgaccccgcctatggcatcctcccctttatcctcacctctatctatggcaccgccggggccatcctcatcggggtgcccatcggcttcctcaccgccgtctttctctccaaggtggcgccccccagggtggccgccgtcatccgcccggcagtggatctgctggcgggcatcccctcggtggtctacggcctggtgggcatgatggtccttctccccgccatccgtaaaacctttgacatcgccgccggtgacagcctgctggccgccatcatcgtattggcagtgatgatcctgccctccatcatctcggtgtccgagaccgccctgaatgcggtgccccgggagtatgaggaggccagcctggccctgggggccaccgagctggagacctacttccgggtctctgtccccgcagccaagagcggcatcgccgccgctgtggtgctgggcgtgggccgggccatcggtgaggccatggctatcctgatggtggccggcaatgtggccaacatgccctctctgctctccagcgtcaaattcctcaccaccgccattgccagcgagatgagctacgccgccgtgggcagcctccagcgcaacgccctgtactccattgggctgatcctatttctgtttatcatgtgcatcaatgtgatcctaaacgtattcctgaaacggaacaaggagggctgagctatgaccaacgccatgatctcctcggaagaggcccagagctaccagtccaagggcctctctccccgccgccgcacctatgaggtggggatgcgcgggctgctgtatctctccgcgggcatcacctgcctgctgctcctctttctcattggctacatcctctaccggggcctgcccaatctgaactggaccttcctcaccagccaggagagtgtcctgcgggggaccgacggcatcatgcctgccatccagaacaccctctatgtcatcgtggtcaccctgatcttcatcctgcccctgggggtgggggccgccatctacctcaccgagtacgcctccaaccacaagctggtctctgccatcgagttcgccaccgagactctggccggcatcccctctatcctgtacgccctggtgggtatgctgatcttctgtcaggtcatggacctgggcaagaccctgctggccggcgccctcaccctggtcatcatgaccctgcccaccatcatccgcaccacccaggagtccctgaagacggtgccccagagctaccgggagggttccctgggcctgggggccggcaagtggcacatgatccgcaccgtggtgctcccctcctccgtggacggcatcgtcaccggctgcatcctgtccatcggccgtgtggtgggcgagtctgcggtgctcatgttcaccgccggcatgggcaccaccctccagaactttttcggcagcttcaacgaccaagctctgtcgcattttctgtccaccggtgacctttcccttctgttcagcggcctgactgacagctccggtgccaccctcactgtggccctgtacgtctacgccaaggagcgggccgagttcgacctggccttctctgtggccctggtcctgctggccatcaccctcgccatcaatctgtccgccaagctggtgggcaagcgcctgaaaaagcgctaaggaggacaactatggatcaatctgtcattctctcggcctgcgggctgaacctgtattacggtgagaaccacgcactgaaggacatctccatcgacatcaaagccaacaagatcaccgccctcatcgggccctccggctgcggcaagtccacctttctgcggaccatcgaccggatgaacgacctgatccccagcgtgaagatcaccggttccctcaccttccacgggcaggagatctacgcccccggcgtggacgtcaccgacctgcgccggcgcatcggcatggtgttccagaagcccaacccctttcccatgtctatctacgacaacgtggcctacggcccccgcacccatggagtgcgctccaagctggccttggacgagctggtggagaagtccctgcgtcaggccgccatctgggacgaggtgaaagaccggctgaaaaagcccgccctgggcctgtctggcggccagcagcagcgcctgtgcatcgcccgggccctggccgtccaaccggaggtcctgctgatggacgaggccacctccgccctggaccccatctctacatccaaaatagaagaccttgctatggagctgaaaagcgagtacactatcgtcatggtgactcacaacatgcagcaggccgcccgcgtctccgaccagaccgctttcttcctgctgggcgacctggtggagtacggggacacggagcagctcttttccatgccccaggacaagcgcaccgaggactacatcaccgggaggtttggataatgcgagtcaaatttgaagcacagctggagcggctcaacgtagaacttatcaccatgggtgccctgtgcgaggaggtcatctccggcgcggccaaggccctgctggacggcgattccggcctgcgggagaccgtgctggccgcggagcgggacatcaaccaaaaggagcgggacatcgaaagcctgtgtatgaagctgctgctccagcagcagccggtggcccgggatctgcgcaccatctcctccgccctgaagatgatctctgacatggagcgcatcggcgaccaagccgcagacatcgctgagatcacccgggatatcgccgacaacagcatcaaggacctggtccctatcggggacatggcccgggccaccatcaagatggtcaccgacagcgtggactcctttgtccgcaaggacctgggtctggcggaggcagtgatctcctccgacgacgtggtggacgatctgtttctccaggtccgtgaggagctgatccgccgcatcggcatgggggacagcggagaggtgtgcatcgacctgctgatgatcgccaaatatctggagcgcatcggagatcacgccgtcaacatcgccgagtgggtggagtactccctcaccgggcaccatgctgacctgccctgaacggcgggcgccccaattttcacagccgtaggaggtcctacccatgatttattttctggaagacgaccccagcatccgcaagctggtcatttataccctgaacagccagggcatggaggcggagggctttgaactgccctcccagttctgggccgccatggagcggcagctcccctccctggtcctgctggacctgatgctcccggaggaggacggcctgcacatcctcaagcgcatccgcgccggcgcctccaccgccaggctccccgtcatcctgatcaccgccaaggggaccgagtacgacaaggtggtgggcctggacggcggggcggacgactacatcgccaagcccttcggcatgatggagctgatggcccgcatccgcaccgccctgcgccacagcggcggggaggcggagccggtccacgcccttactttgggcccactgcgcatcgatccggcccgccatcaggtgctggcccacgggcgggaagtcaccctcaccctgaaggaattccagctgctctcccttttggtggagcatgcggggaccgtattcacccgggaccagctgctcaacaccatctggggctatgagttcgacggcgccagccgcacagtggatgtccacgtccgtaccctgcgtcaaaagctgggggaggcgggccgctgcatcgagaccgtgcggggtgttggctacaaggcggaatctgatccgtccaaaagtgaggaacagccatgacatctaaaatcttccgcaactcctttctggtgggcgttgcggtgttctttctctctatcgctctgttcatgggcgtgctgtaccagtattttggcagccagctgctgatccagctggagtcggaggccgccctggccgcccgtggggtggagatgggcagcatggattatctggacggtctctcctccgccaaccgtatcacctggatcgacgccggcggcactgtcctctttgacaaccaggccgaccccgcccagatggagaaccacgccgaccgggaggaggttcgagccgctctggagagcgagacaggcaccgcctcccgctactccacgaccctctctcagcggaccctgtactttgcccagcggctggctgacgggacggtgctacgggtgtccagtgagcagcgcagcctcccttccctgctcctgtccatggtccagcccatcctcatcatcctggtgctggccgtggccctgtcggcggtgctggcctcccgcctttccaagcacatcatcaagcccgtccttgccatcgacctggagcacccagaggactccgacacctacgaagagctcacccccctgctttcccgcatcaagcagcagaaccagaccatcgcccagcagatggcccagctgcgccagaagcagaacgagttcaccgccatcaccgagaacatgagcgagggcttcctcctgctggaccggcaggggcgcatcctctcccacaactccggtgccctgcgcctgctccacgccgccgcccctgaggaacgggccagctacctcactctgaaccgcaccgagcgcttccgccaagcggtggatgccgccctcaccggcaggcgggacgagcagctggtggacctgggaggccgctgctgccagctgctggccaaccccgtgatccaagacggccaggtggccggcgccgtgctggtcatcctggatgtcaccgagcgggaacagcgggaggagctgcgccgggagttcaccgccaatgtatctcatgagctcaagacccccctcacctccatctccggcattgcggagatcatcaagggcgggctggtcaagccgcaggacatccccggcttcgcagacgacatctacggcgaggcccagcgcatgatccgcctggtggaggacatcctccgcctgtcccagctggatgaagggggcagctccctccagacggaggaggtggacctgtaccacctggcccaggaggtggccggccgcctgacccccgccgctgtcaaggggcaggtcaccctggaggtgacgggcggaccggtgcggatctctggcgtgcgccagcttttggacgagatgatcagcaacctgtgcgacaacgccatcaagtacaatcgtcctgggggccgggtcactatctccgtctcccgctccgaccggggtgcggagctctctgtgtccgacacgggcatcggtatccctcctgaggaccagagccgggtctttgagcggttctaccgggtggacaagagccactccaaagccatcggaggcaccggtctgggactgtccattgtcaagcacggggcggccttccacggggccgacctctccctggagagccagccggaccgcgggaccaccatccgcctcaccttccccggccaaaacgtgaaataaggcacatggcccgccgctggtacggcgggccatgcttttttctctctgggaaaaatagacgggatcctgctctgttcaccggctgcttttgtcgcggctggaaaagtgcggagcacggcccaattttttcagaaaagggcttgacaaatccggttagcagaagtaaactctatctgttccgatggttagattaagctaaccagcttttcaagcaattctagcagcaaaagtcaacctgatctgggagggagtcttatgatgcccctgacaatggccagacccggcgagaccgtggtcatccgaaagatcaccggcagggacgaggtgcgccagcatctggcagagctcggctttgtggtggacgagtcggtgaccgtcatcagcgagatggccggcaacctgatccttcaggtaaaggacagccgggtcgctgtggacaggaccatggccaaccgtattatgatttgaggaggagagaaaggatgaaaacgctgaaagacgccaaggtgggagacaccgtcaccgtggctaagctccacggcgagggagccgtgaagcgccgcattatggatatggggatcaccaagggagtggagatccacatccgaaaggtcgccccgctgggggaccctatggagttgaatgtgcggggctatgagctgtccgtccgcaaggcagacgcggagatgatcgagatcctctgagctccgctttcgtttttcactgttagttagtcacttctaactttctgaagggagaaataccatgaacatcaagatcgcgctggcgggcaacccgaactgcggtaagaccaccctgttcaatgccctgaccggctccaaccagtacgtgggcaactggcccggcgtcacggtggaaaagaaggagggcaagctgaagggccacaaggaggtcatcatccaggacctgcctggcatctactccctgtccccctatacgctggaggaggtggtggcccgcaactacctggtcaatgagaagccggacgccatcctcaacatcgtggacggcaccaacatcgagcgcaacctgtacctgaccacccagctcatcgagctgggtctgcccgtggtagtggcggtcaacatgatagatctggtgcggaagaacggcgacaagattgacctccagaagctgggccaggccctgggctgccaggtggtggagatgagcgccctgaagggcgagggcggcatggccgccgccgagcgggccgtagccgcggcccaggcccacaaggccggggagctcccccacgtgttcactggcagcgtagagcacgccatcgcccacattgaggagtccattcagggcatggtggacgaccagtatctccgctggtatgccatcaaggtgttcgagcgggacgagaaggtgctggagtccctgaccctgaccaaagacctggaggcccacctggaggcccacatcgccgactgtgagaacgagctggaggacgacgctgagagcatcatcaccaaccagcgctatgcgtacatcaactctgtggtcaacagggcagtaaaaaagaaggcccccaagcacagcctgaccacctccgacaagatcgaccggatcgtgaccaaccgtgtcctggccctgcccatcttcgtggcagtgatgtttctgatctatgccatcgccatgggcggctgggccatctccatcggcaccgccgccactgacttcaccaacgacaccatcttcggtgagtgggtgcccggcttctttgacagcttcctgctcaacgccagcggcgagcctgtggtggccgactggctgtacggcctgatccaggacggcatcgtggccggcgtgggcgccgtgctgggcttcgtgccccagatgctggtcctgttcgtcctgctggctgtcctggaggatgtgggctacatggcccgcatcgccttcatcatggaccggatcttccgccgcttcggcctgtccggcaagagcttcatccccatgctggtggctaccggctgcggcgtgcccgggatcatggcctcccgcaccatcgagcaggaccgtgaccgcaaaatcaccatcatgaccaccggcttcattccctgcggcgccaagatgcccatcatcggcctgttcgccggcgctgtctttggcaactccgcctgggtggctacctccgcctacttcattggcgtggcggcggtcatcgtctccggcatcatgctgaagaaattcaaggcctttgccggcgagcccgccccctttgtcatggagctgcccgcctaccacgccccctccgccggcaacgtgctgcgggccacctgggagcgtggctggtccttcatcaagcgggccggcaccgtcatcctgatctcctccatcatcctgtggttcctccagggctacggttttgtggacggcgtgttccaggccgtggaggacaacaatgactccctgctggccgtcatcggcaatgccatcgcctggatcttctaccccctgggctggaccggttccatggcctggaaggccgcagtggctaccttcaccggcctcatcgccaaggaggaggtggtcaacaccttcggtgtgctgtaccactacgccggcgacatcgatctgatggaggactccagccccatctgggctatggtgggggctgacttcggcgccatctccgcctactccttcatgatcttcaacctgctgtgcgccccctgcttcgctgccatgggcgccatcaagcgggagatgcacaacacaaagtggactctgggcgccatcggctacatgtgcctgttcgcctatgtgactgccatgatcgtctatcagatcggcggtctgttcaccggcgaggccgccttcagcgtcttcaccgtcatcgccatcgccctgctggccggcatcatcttcctgctggtgcgcaggggctaccagcccagcgaggaggtccgtcacctgaccgacatccctgccggcaagaaataatctgtgatcgacaaggagggtcagatatgtcccagctgctgcctaccatcatcgtctccctgatccttgcgggcgtggtcgccctcgcggtccgctccctgtggcagtcccacaagtcgggcggccactgcaatggggactgcggcacctgcggcgggtgcggcggacaccacactcgctgcggcccccacgctccgaagtaaaatatgtatataagagcctgccccggacaccatctgtctggggcaggctcttatattgccgctgtctcctgaaaatccgagatgatctccaggaactgagctccgtactgctccgccttgaagctgcccacgccgcccacgttctggagctgacgcagatcccgtggctgggcagccgccatctcccgcagggtcttgtcggagaaaatcacaaaagccggcacgccccggaggcgggccaggtgggcgcgctcctcccgcagccgctggaagagggcctgctgccgctctgtcagggggctgtcctccgcccgccggcggtcggccgccggccgctcctcccgaacggccttcatcatcagcggtccgtcgctgtacgccacgtcctccgcccgctccccgcaccggaggaccgggtactggccgtcagtgagctccaggatgtgctcgtccaccaggaagcggatgcggtcctggacctcccgctgactcagggcggccagggctccataggtcctctcccgctccagccggtaacggcggatcttctcgttctccccgccgcacagcactgcggcgatcagtccggcgccgaaccgctggccggtctccgccacacagcggaggatggcccgggcgtcctcccccacatcgatctcctggaaattgtggaggcagttgtagcaggcgccgcagtagtccggggccgactggccgaaatagttcaggatatactgacgcaggcaccgccgggtgcggcagtagaacgtcatctgcttcagacgacccaagtcccgctcctggagctgccgcgccgtctccgggtccagctgctcgctgggctcgctctggctgatgaggaactgggctgtgcgcacgtcctgcccgctgtacagcaggatacatcgggcctccgccccgtcccggcctgcccggcccgcctcctggtagtagctctccaggtccttgggcatgttgtagtggatgacgaagcgcacgtccgacttgtcgatccccatcccgaaagcgttggtagccaccatcacctggacccggtcgaagaggaagtcctcctgattctgctgccgctcctccggctccagcccggcgtggtagcgggttgcggagatgccggagctctggaggaactggcagacctcctccacgttcttccgggtggagcagtagacgatgccgcactcccccggccgctcccgcacccgggccagcagctccacccgctttacggaggggcggcacacctccagatacaggttgtcccggtcaaacccggtggtgatggacaggggggcctccagctccagcagccgctggatatcctcccggacctccgaggtggcggtggcggtgaaggcccccaccaccggcctctggggcagccggtccacaaagtccgggatgttcagataggcggggcggaagtcctgcccccactgggagatacagtgggcctcgtccactgccaccatggagatctgggccgagcggacaaaggactggaacccctcggtatccagccgctccggagccacatagatgatcttgtaccggccctccctggcccggtccagggccagcagatactgccggtaggtgagagagctgttgaggtaggcggcgggcactcccatctgcaccagctgggtcacctggtccctcatgagggagaccagcggggagaccaccagggtgatgccgggcagcagcagggcaggcacctgatagcacaccgatttccccgctcccgtgggcatgacggccagcacatcccgcccggccagcagtgcgtcgatgatctcctcctgaccgccccggaaggtgtcatagccgaaatactgcttcaaaacatcctgctttgtcatagtcgttctccgctctttcccgcaaagcacacccccggagccgcgctccgggggatgtgtgttccgctggggtcctttttgcaggtggggcacctgaaacctgcgccccggccctccggtgctctgcccgcctgtcagttcaaaaagtcttttcgtttcttggaacgagaaggatgacgcgtcgccgtcgcggactgcatatccctcgcccccgccggaggcgggagctcactcattccgtcgctccggctctccccgtgcggcccgctgcgctgggcccgcccgggggccccggaaagctgcgccccggaacactcagcaaaacgatccccggatcagttcaaaaagtcttttagtttcttggaacgagaaggatgacgcagctttctgagggccttggcctcgatctggcggatgcgctcccgggtgacgttgaactcctttcccacctcttccaaggtacgggtccgtccgtcctcgatgccgaagcgcagcttgagcaccttctcctcccggggggtcagggtggagagcacatccaccagctgctccttcagcagggtgaaggaggcggcctcggcgggctcgctggcatcctcgtcggggatgaagtcccccaggtggctgtcctcctcctcaccgatgggggtctccagagagacgggctcctgggcgatcttcaggatctcccgcacccggtccaccggcatgttcatctcgtcggcgatctcctccggcgtggggtcgtggcccagctcctggagcagctggcgtgagacccggatcaccttgttgatggtctccaccatgtgcaccgggatgcggatggtgcgggcctggtcagcgatcgcccgggtgatggcctgacggatccaccatgtggcgtaagtggagaacttgtaccccttggtgtagtcgaacttctccaccgccttgatcaggcccaggttgccctcctggatcaggtccaggaactgcatcccccggcccacataccgcttggcaatggagaccaccaggcgcaggttggcctctgccagccgctgcttggcccgctcgccctttttgatggctttctccagctcggtgcggatctcggcggggatctcctctccggagctctccagctcctccatctgctcctttgcctcggcgcccgcccccatggcctgggccaggtcgatctcttcatcggaggtgagcaggttgaccttgccgatctccttcagatacatccgcaccgggtcgtcggtgccgaaggcgtccaccatggtgttggggtccacgatctcttcctcaggcagctcctcgatggcctcaatggtgggctccacgtcgtcgggcagctcggggatgtagtcctcccccactgtgtcgatgcccaggttctccagagtatcatagatcttgtccatctgctcggactccagatccatgtcctccagcacgtccatcagctcggcggccgacagattgcccttcttcttgccccgctcgatcagttcggccagcttttccgcacctgggatgcctcccaccaccttcatgacctccaccttgcccgcctccatgcgggtctcgatgtcggtcttgctcttcttctcttccacagcggcggaagtctctgtcttcttggtgctcatggcttctcctccatatatgcttttgtttcctgatatctcttttgcgccgccctcagcagagcttcctcatctgtcccgctgcggcgcagcccctcctcccggatgagggcgatgtagtcggccagggctctgcggctgttggccagattttccggctgctcggccacccaggccaggtgggccatctcctccggctccagcgccccggccagggcgggcagctgggtgctcagtccctctgccgcacggctgcgcagcaggtcaaagatccgccccagcagcggagaggagaactccgaacccgtcaggccctccgtctcctccagcagggagctgtccagcaggatcaggcgcagcaccccctcctccgcccgggcggagcggatgttgtcgtagcgcatccccctggccttgggctggagctgggtggcgggggacaggtcccgccgctcctgctgctttttttccttctggatgcggcggcggagctcctttttgacctcctgggccatggcctcggcggagatgcccgccatctgggccgcatggcccccatagatctcccgctccaccgcgctgtgcagggaggcgatcaccccggtggcctcccgcagaaactccacccgctggctgtcgtcgctcaggtcataccggccccgcagctgctccagccggtagtcgatgtggttctcgcttttgtccagcagacgggcgaaggcctcgggcccgtatttcttgatgaactcgtccgggtcctttgcccccttcacccggaggaccttcacattcagccccgcccgctccagcagggggatggcccgctgggcggcggacacccccgccccgtcgccgtcgtaggcgatgaccgcgtccttgaagtagcgggccagcagctgggcgtgctccgcggtcagagaggtgcccagggaggccaccgcgctgtcaaagcccgcctggtggagggagatggtgtccatatacccctccgtcaggatcacccgccccgccctggacttcttggcgatgttcagggcaaatacattgcggctcttgttgtacaccggcgtgtccggcgagttgaggtacttgggggtggagtcatccatcacccggccgccgaagccgatcacgtccccccggatgtcgatgatagggaacatgacccggtttcggaagcggtcatagatgcggccgtccttgttgctcaccgccagcccggcgtccagcaggtcggccttgtcccacccctgctccgccagggccgtcagcagaccgtcccagcggtcgggggcgaagcccagtccgaaccgggtcagggtcccccggctcagcccgcgcctctgaaggtaggccagccccgccgccccctccggggcgtacagccacttgtggaacacccgggccgccgccttgttgatggtcagcagcttttcccgccgctccttcatgccggcgctgaagccgccggtgtccggcacctccagattcacccgcttggccagcactcccaccgcgtcccggaagggcaggctgtccagctccatgatgaagttgatggccccgccgcccttcccgcagccgaagcacttgaagatctgcttgtccggggagacggaaaaggagggggtcttttctgagtggaaggggcacagtccccagtagttgcggccctttttggtcaggcgcacatactcgcccaccaggtccacgatgtcagtccgggcgatcagctcgtccaaaaaccgctccggtatgggcatttttctcccccttccgctattgatggcccgaatcccggctctttatccctatttggggaaaaaggcctacttcacgccccatcccatggggatgaacagccgggtgtactcgctcaccgagaaggggtcggtcatccctgcgatatagtcgcacaccgcccggtccaccccctcctccaggcggatcgcctggaagtcggcgggcagctcatcggggtttttctggtaatacccgaagagcatcttcagcatgtcctgggccttgctctcctccccctttgcgatggggttggtgtagacattggcgaacatgaactccttcagcaccgccatggcctcccccacctggggggactgacagatgcggtcctgcccccggctggcggagatggcgtccaccaccagggcgttgatccgctccccgtgggtaaagcccagcacctgggacacctccagcgggatgtcgatggggtagatcactccgccccgcagggcatcctcgatgtcgtggttgatgtaggcgatcttgtcggccagacggaccacctgcccctccagggtggcggcgtcctccccgccggtatggcgctcgatgccgttgcgcacttcccaggtcaggttcagtccggctccctccttctccagccgctccaccacccgcagggactgccggaagtgggcgaagccgccgggcacgatggagttgagcagccgctctcccgcgtggccgaagggggtgtggcccaaatcgtggcccagggcgatggcctcggtcaggtcctcgttcagcgccagcccccgggcgatggtccgggcaatgcggctgacctccagggtgtgggtcatccgggtacggtagtggtccccctccggctggaggaacacctgggtcttgtgcttcagccgccggaaggacttgcagtagacgatgcggtctgtgtccacctggaagcaggtgcgcacgccgcagggctcctccggccgcgcccggccccgggtctgctccgccaggcaggcgcgggaggacagtgtctcccgctccctctgttcagtctgctctctcagcgtcatggtccctcctgtcccaccccgccggggtgcatgtgaggtcgtacagttccgtacactttatcttatacgaggccgctccccattttccttctaaaaaatcaaaatttttcaaaaatttttttatccgggtccgccggcccctccggcggaccgccaaggcacgtcctggaaccgctccccggtggcgatgccctccaccgtcccggcggtcatgtccaggatgtgtgccagatatgcctccgccttctcctccggcagcaagacagtgagggtcacatcagccccgtactccgtctccgggatcacgccgccccaggcggcggtctccgacttcaggcgctccaaaaggctgtatggacagggcaccagcgtctccacccagcggcgcaccaccgagatgccggcggcgtccagggcatccttggcgctttgagtataagcccggaccagcccccccgcccccagaaggatgcccccaaaataccgggtgaccacacagcagacgttggtgacctcctcccgctggaacacgttgagcatgggctggcccgccgtcccctggggctccccgtcgtccgagtagcgcaccggcccctcccgcagcaggtagcaccagcagttgtgccgggcgtcgtagtaccgctttttcatctcctcgatgcgggcacgggcctcctcctcgctctccacacgccagacatggccgatgaagcgggagcgcttctcgaccagctccgcctcaccggcctgggtggggatgtaatactctgtcatggggtcacctgcctttgcacgttttggggaatactcgcggggcgcgcctagattggcacaataggggcggctggtgggaaaccggcgggcgcgcattgcgcgcccctgcgcaaaggccgaaaatatcatgtaggggcggcctccagccgcccgaaaagccttcccctcctccgggggggaaggtggcacggcgaagccgtgacggatgagggggcgttcttccgccagagcgattcaatagcccgggcaggtctggaaatcactcctgcggcacatcgcagacctgggaccggcgggcgggggcaagccccaccccctacacaaagacagggagaagcacgcacccagcagggcccgatgcccgcatcgggccgcatcctcacggacggcgggcgcacagtgtgcgtccctgcgcagggaccggggccgcggcgccccttagggctcgtcaggaaagactttgatctgcaattccttgcagatccggaaaaactgttccaacgatggattttttcttccccgctctatttcactgataaatgtctgtgtcacgcccagccgttttgccagcttgttttgacttaatccctgcttctctcggttccttttcaaaattgcccgataatcttccatcgttctcaccttcttctctattatagctcatagctattgttttgaaaattatagcttttagctcttgaccgagcaagagctgttcgctataatagctttaagctctatatcagaaggaggtaatcatctatggaacacgagctcgatctgctggaccatctgaacgacacggtcacccgcatcacagaggacacgctgctgctctcccttctgctggactatatggacggtctctcctgccgcccggagcaggtttcccgggaaatctccgaaaacctcctccagcggctgggggacagcctggagcaggacgccggcgccctccgccgcctgtggcagtcctacggggtctccggccgcagcagggcgtacatgcagtagtcccgcagccggccgtttttccatatgccgcagcgcatgacgccctccagagcgaagcccgccttctccagcactcggcgggagccggcgttgtgggcgaagggctccgcgtagatgcgcacgatgtcccacgcctcaaagcccgtccggcacatctcctccaccgccttggtcatgatgccccggccccagaaggcccggcccagccagtagcccagctcggccgaccggcggcagacatccgtgccccgggtgagggccacgctgcccacggcctgtccatccaccacgatggcccggaatatggcctgctccggctccgccgccctgcacaggcggatgaactcctccgcgtctgacagttggtaggggcaggggaacacatcccgcaggttggcggccacctgggggtcatcggcatgccgggcgatagagggggcgtcctccgggcgccagggtctgagcatcacgtccatggtcctttccctttcttttctgagatggggctttcagtcttcccagggctcccgacgtggcctccagccctccaccagcgggcccagctgaccgatcaccttgggggtgcagaccgccgccacatcgatggtctcgccgtactccaccgactccaccttggcctgctggtagagcttgtccagcagcccgccctggtcgtagggcagatggatgatcacccggcgggcgccgttgtccagccgcctgccgatggcggccagcagttcgggcaccccctcgccggtcctggcggagatggagacgatgtcctccccgtggggccggatgtcccccagataccggtcgcatttgttgaaaacatccaggcggggggtctgttcggcccccagctcccggatcaggtcctccaccaccgccgtctggtcccgccactccgggttggaggcatcgatcacatggagcagcaggtcggcgtactccagctcctccaaggtggccttgaaggcctccaccagatggtggggcagcttgcggataaagcccaccgtgtcggagatgagcaccgtgcaggtgtcggagatctccagggtgcgggtggtggtgtccagggtgtcgaacagccggtcattggccgggatggccgccccggtgagccggttgagcagggtggatttgcccgcattggtatagcccacaatggccaccaccggtacctcgttcttgatgcgccgctcccgctgggtggcccgcacccggcgcacatccttcagctcctcctccagcttggagatcttgcggcggatgtgccgccggtcgctctccagctgggtctcgccggggccgcgggtgccgatggcgccctcctgccgctccagatgggtccacatgcccatcaggcgggggagcagatacttatactgggccagctccacctggagccggccctcccgggtgcgggcccgctgggcgaagatgtccaggatcagggcggagcggtccagcaccgacacccccaggtcctctgacaagaccctctgctgggagggagacaggccgttgtcaaagatcaccatgtccgcgtccatggcatgggccacttccttcacctcagccaccttgccctccccgatgaaggtgcgggggtccgggctgtccttggactgggtcaccacgcccacgcactctccccccgctgtctccagcagggcggagagctcctccatagaggcctcgtcggcgttctcctccggggccaggacgcgggaggacaggcccaccagcaccgccctgtttttcttttccgtgttgttttctgtcatagatcctccaaaatgggattttccccgtctgtcaggaggcggtccgggcgctgaggcccttatttcctcagcgcctccacgacctctccgatatacatggtatggtagtccttctcaggataaaatctgtccttggcatcctgggggatggcctgggggtccatctcctgggcatagcgcttgcggcagaccagcaccagctccgcctcctcaaaatagggggccccgcactcggcctgggccacggtgaagccgcactccttcaccttgtccacctcccggccgctcttgctgccgcacagggtgagggccttgcgctgctcctccccgaaaaaggccagggtgaaatactcctcccggtccacgaactccttggtgtaccgctggggccgcaggtaaatggtggccgccggggcgccccacagcacgcccagtccgccccagctggcggtcatggtgttgcaccgctccgccgtgccggcggtgatgagcatccaccggtccccgatgagggaaaatacgttgtcctgcaagctcttcacgtcgatcttcttcatgatacagcctcctaactcatttttgatctcatctgttagtttatgcccctccctggggcgaggatactccgggccgacagcaaaatacgacaaaaagccgcaccgatccacggtgcggcttttgaggcgcaatctcacttgtccaggccgaacttcttgttgaagcggctgacacgaccaccggtgtccaccatcttctgcttaccggtgtagaaggggtgacacttggaacacacttccacgcggatatccttcttggtggagccagtctcgatcacattgccgcaagcgcaccggatggtggtctgctgataatcgggatggatgcctgctttcattgtatcttcacctctttctccatggagggatcatctgtaaacgcaactgatataatagcatggatctcccgcaaaagcaactattttttcaaaaaattatcctgacttttttctcggcccttttgtcgccctttcacagaaggaccagctcccccggttcgaagaaccagagcgcctttcggaccacctgttttccggtgatctcctccagggcccggctgtacgcctccagctgagggcggtactcctctccccgggccgccgccccggaccgggagacccggtcgctcttgaagtccaccaccgtgatgccctccagagtctcgaaccaggcgtccactacgccctggagcagcacctcctcccccggctccaggccggggcagaactcctccgccggcagcagcacggaaaatttgaattcccggcggcacacgggggccgacgccatctccctgcccaggggcgagttaaagaacgcggacagctgtcccggatcggccgccgccccctgctggggggtgaggaagccgccggacaccaggcgctccagctccgccgctgcccgctccggggtgtccgtgtccagggggagatactgcatggccaggtgcagggctgtgccccgctgggccggggtgagtccccgctcctccgccacgaactggggccgcaggatggagagcggctggggcggaagggccgccggggcggcctcctcccgggtctcctggtccaggctccgccccttgagctgggtggcggtgagcttggagggggtctgggaggaaagggagaacggatagtgccaggccagcgcctctctcagcccctccggttccgtctccgactctccgggcagatccgcgaagcggcccctctgctccggaatctgggccagtgccgccccatctacccatcgaatatcccaggcgggccccagagtccccggggacacctccggcagccccgccatgctccgcagggcggacgcctcgggccgggccagggcgtgaagcagcacccagccgcccacgctctgctggcgctccaacgccatgggggagggtggaacagacaggtcctcccccagcttctccagcttctccgctccccgccgcagcgggatggagaggatcagcttctctttggcccgggtcatggccacatagagcagacgcagctcctccgccatcatctcccgctccagcttccgggccaccgccttgcgggccagggtgggatactccaccatccgctcccggtccaggccccgggggcccacccccagcaccggatggaagaggacaggccgctggaggtcgtcccggttcagccgccgggacaggccgcacagcagcaccaccggtttctccaaccccttggagcggtggatggacatgatggtcacaccgcccccctcccggcctggggcggccagggacagtcccccggtctggcgcatccgctccaggcgcagcaggaactggaagagagaccggcaccccgcctcctccagacgccccgccagggcatagagggtgagcaggcggccctgccgctcctgccccccgtccatggccccgaacaggcccagcaggttggtccgttcatagatgtgccagatcagctggcggcaggtgcggtcccctgccccgaagcgcagctcctccagctccgtcaggaaatcccggcacgcctggtccccccggccggcggcctgaaccacagcggaatagaagtccccctccccctccgcccggagcagagccagctgatctcctgaaaagccgtacaccggggagcgcagggccgcgatcagcgccacatcctggcggggattgtccacgatctggagaagggacagggccacattgatctcggtggaggcaaagaagtcctccccgccctcggcggaccagggcagccccgcctcgttgagggcccggatatagtggtggagcaccgccccaggggagcgcaggagaaggagcacgtcagagggctccgcccgccgctgcccgctcccctccgtcagcatcagctccccgtccagcagctcccggatacggcgggccgcccagcgggcctccagcagatttttgtccgcccgctccccttcctcctggtcccccaggaaggacaggtcctccaggtccagctccacccgccagtctccctccggcgggaaggcggctcccggcgccagcgcctggtcctgggtgtagtccagctccccgaattcagttgacataatatttcggaagaggtcgttggtcccctccaggacctccggccgggaacggaagttgcgggtgagcaccactgtccgctcctccccctccgccgcctggtcccaaggtttgaaacggcggtacttgtccaggaagatggtggggtcggccagccggaagcggtagatggactgcttcacgtctcccaccataaacagcttccgccccccatcggacacggcagtgaagatggcgttctgcacctggttggtgtcctgatactcgtccaccatcacctcggcgaaccggccgctccagtaccgggccagcgggccgggccctccgtccccgtcctgggtgagcagccgcagggccagatgttccaggtcggaaaagtccagtatgccccggcgcgccttctcccgggcgtagtcctcctgaaagcgggccgtcagctccatcaggccccgcaccgcgggccgggccagggccagatcggccagcagctgcccgctgtccccgcccaggtcctcaaagagcttgtccatctgcttcttgcagcgggtgcgcagtcccttcacccgctccgccgcctccaggtcctccacgccctttttccgccccgccgccgggaactccactggcagggcccggtacacgccgtcccagctgtccgccgccagcagggcccgcaccccctggatggactgggagagactggggccgtaattctggctgagcacgctgtcccggccggtgagttccagcgcccggagcagcagctccaggcagcgctccccctgccgcctggcgtcggccagcagcagcgccccccagggggtgtcccccgcgtcggtgaccccatccagctcccacaggcggctctggtctgccagccagcccgccgggtccgggtggctctggatgcggccgaacacgtccagcacgatctgctccaggcggctgtcgtcccgcccggcggccatggtgtccaccagggcggcaaagtccccctccgggtccagatcctcgtactggcggtccagggtctcccccagcacccgggccatcaggaccgcgccctccccctcgtcgcacagccgaaagtccgggtccaacccgatctggtggccgctctcccgcagcagagcggcacagaaggcgtgcaccgtggagatctgggccttgtagaccaacgtggtctgccgccgcaggtgccggtcgttgggccgctccgccagccggtcggacagctcctgagcaatccgggcccgcagctctgccgcagccgcccgggtatatgtaatgaccaggaagtcgtcgatatccgctccctccccggtcacctggtccagcagccgctccaccagcacccgggtcttgcccgagccggccgcagccgacaccagcagtccgcccccccggtcatggactgctctgctctgttcctctgtcaaggcaaaggccatctgcgcgtcctcctctctctgtccgctccattcacaggatcaacaccagcgtccctgccgtgatgagcaggcctcctatgacggtctggacggtcaccgcctccctcagcaccacaaaggccagcaccatggagatgaccacgctgaacttgtcgatggggatgacccggctggcctggccgatctgaagggcgtggaaatagcacagccaggacaggccggtggccaggccggacaggaggaggaacacccagctccgggtggaaatatccccgatctcatgctgcttccctgtcaggaacacaatagcccaggccatcaccagcaccaccacggtgcggatggcggtggccaggttggagttgatgccctccatccccagcttggccaatatcccggtcagcgcagcgaacaccgcagacaggagcgcaaaaactgcccacatatcccttttcttcctttcttccgccctctggaggctcagagatccaattccttcaaaaaccgctcgatgcggatacccttgttcttctccacctcgttgcggtccagacagaccaggcgctccaccgtatccatggccttccgggccgcctgctccaggccggtcccggccagcagctctcctaccaggacggcagagaacacgtcgccagtgccgggaaagtggaccttgatgaagtcgaagggcagggtgaagtaccgcccctgccggtgacagtagccccacaccacgtggcggccggtctccgcctccagcccgctggtgatgaccaccgatctgggcccgcaggccagcagggcgtccaccacctcccgggcctgatgccggtcgagggcctccgccccccggtaccgctctgtcaggaactccgcctccgtcaaattggggacgatcacgtccgccaccccgatgaggcggcgcatgttctccaccgtctcctcggtgacgccgttatagagcttcccttcatcccccatgatggggtcggtcatcaccaacaggtcctccttcctctggctctcgatgaaggcgcggataatgtccacctgctccgccgaggccagaaagcccgtggtgatgcagtcaaaggagaagcccagctccttccacacggcaatggactttttcatatagtcggtggtatccaagatggtgaacttcccataatccagggtgttggacaccaaggcggtggggaggttatagatattatgccccatgtgggacaaaatcggcagcatggcggccaaagcgacctttccatatcccggcatgtcgttgatgatcaaaatattcttgttctgctgcatggtccattccttcttttttcatcgttctgcttttccggttttcctgtcacagccggaccgcccagtccccgtaatcaaaggtgccgccgccgtggcggagctttccctgctctttcagcccgcggaaagcgtcccgcacacggcccaggagctccggcccgatgtccagggcgtggtgggcagggagcaggcgctccatcggcaggcaggcggtccgctccagggaactcaggtattcctccgggttggtagaggggtagcaggcgaacagggtgcctcgatagactagatctccggaaaaaagatagccccgctccgcctcccaaaaacacatgtggccaggagagtggcccggcgtgtggagcacctccaaggtccgcccgcccagctcgatgcggtctccgtcccgcagcacgcgggcgggatgcccctggaacagggtgtaccggctcacatcaaaatcttccggcaggcaacagcggtccgccaccatggcccggacggcctccacggacagcgggaacccgcccgacagccaattcagctctgcctcgtgggcgtaaaactccgggaagtaccggtggcccccgatgtggtcccagtggatgtgggtggctaccgccgccaccggccgatccgtcagacggtccaccgcctgccggatgtcgcagatccccagcccggtatcgatgagcaggctgcgctcccttccccgcagcaggtagcagtgagtctcctcccagtggcggtactcactgaggatgtccgtatcctcatcgatccgctccagcgtgaaccaatcatccatctctgtctttcctttccaattcctacggggtctgtgcgccgtccagcaggaaatccagcacgaggggattgaaggtctgccagttccgccgagccacgaagtggtccccgggcaggatggccagccggctgtccgggatggcggcggcgatggcccgggtatggccctcccggatcatgtcccgctcccctgccaccaccaaggcgggcatagggagccgggcaagcgcctccgtggggatgtggggctgggtcaccatcaggtccagcatctcccaattcgccctggccttccggctgaacagggctggcacccggcacattccccagcccagcacgatgggcagctgggtggtcagcttcacgccggaggggcacaggtccgccccattgaggatcagcttttccacatactccgggtatttcagggcgaacagcagagcgatgttgcccccgtcggagaagcccagcaggtggcatcgggtaatgctcctcccgtccaggaactccttcagatcctccgcaaactgctccagggtgaagggggcagtccctctggggctctccccatggccccgggtgtccaccgcgatgacccggaagtgctgggaaaagggtcccatctgccgcttgaaataggtgtggtcctccccgttgccgtggaggagcaccagcgggaatccctcccccgcctctacacagcacagcctgatgtccatcacagtcctcctctcacagccctgtgcccaccaggggcagcacgttgatcacgggctcctcataggggtgggcctccttcactgccgccagggtctccctcagccgctccccccggcagcacacctcgatcttcagctcctgctcctgggacagctccccagggatgccctcaaaggggtccgccccctccaggggcctccagcagctgttcacccggctccagctcaggcaccggtcatactccccgatatgcccggcgtccaccgaccacagggcctgacggacagccgcgaaatagtcctccggcacaaagatctccagcttataaaaacgatgttccatctgctgcacctctctcagtctgtctcccgctctacgttctcccagaactcctgggccttgacccccggcagccagcgccggcagtccccgcctctgccctcctcaaagtggcaggcggcggcgtagtcgcagaaacggcaggcgttcttctcaggcccccgccagaagggatcggcagcgatgttgcctgccgccagttcccggcagatctcctccaggactttgcgggtgtgcttctccagccgccccagccgctcggcgctcaccagggcctcgccggtgatctcccctgtgcttttggacacccgcaggggcaggaagcggtagccccccggccctggccgctccatggcctccagcaccgccccatcggagaggaccaatccccggcggaccagctctttgtccactgccttctgccgctcctcctcgctcatggtccggctgccccggaccaccgcgtcccgggcaggcaggtaaagcacccccgccccctctaccggcagtccgtagaacccctctccccgctcctccagggcgaaaaggtacagaagcatctggaggcccaggccgttccacacctccgtcaggtcaaagcttttacgaccggtcttgtagtccaccacccggaggtggagccgcccgttctccacccagccgtccacccggtccacgaagccggagacgctgatggtaaccccctccgccgtcagctccaccggaggcagctccccccggctcccaaagcccagctcaaaggaaatgggccggaatcgggaggcgcacagctcctgggccacgttgtccaccaccgcctggacggagcgcagcaggcggcggaacagatagcggaagcgctggctctggtgctccaaccctcccagttcctccgccgtgtagcggtccaccgccgcccgtaccgccgctctcagccgcttttgcagctcctccccccagctctcctccccgatggggcagctctggagcacatgctccagcacatagtggacgaaggtgccgtactccggcgcagtgaatccggcaggcttccggggctccgcctggaggccgtagcgcatgaagtaggagaagtggcaggacttgtacttgtccatccgggaggcggacatgggtacccgctgtccatacagccggtccaccgccccccgggtcagcctgcctctctcccagcgtccggcccgttccagccgctccacctggggggcgtactccggcagggaccccatcacccgccggactgccgggctccgccccgccagctccaaggcgggcaggggggccgccatgcggaaggagtcccccagtccctcctcccgcacctctgcaaggccggggaagagcagcttcagccgccccaccaggaagcaggaccgccgctcctccccccccgccccctgggcgggccaggtgagaatcagacgccggctgggcagggcgcagatctgatacagggtggtcatctcccggtagaggcgctcctccgcgctctggttcagctccaggccgtaggaggccagcagggtgcggtcgtcgtcggagagcaggccgggctccgcccccacctgggggatggagctgtcgtccgcccccagcaggaagagcaccttcacccggtggccggtctgccgggtggtttcccccgctgtcacccggtccagtgagaccgggatagtgcccacgtcatactgagagagcaccagctggaacagactggagaactcctccagctccataggcacctccccggtgagggcggcacactgctccagcccgccgcacaggatctcccagagctggcggtactcctcggccagcgcgggctccccccgccggcgcagttcctccacccgctctcccagccgccggggcaggccgatctcctccagaaagccgtagagagccatagcctgtccacgtcctgtacgggccgaatttttccgcagcctctccagcggggccgccacctgccgccgggcccggtccacccgctccaacagggcctggtcctcctccgtcatggggaagccatagcccctggggtgcatggtccagggcttctcctgcgtccaccggctcccccggatgtcccacttcaagacatagttctccagcagatcccggtcctcctcccccaggtcggtgaggccggtcttgagatagcggaacacgtcgtcatagacatatccccccgccaccgtgtccagcgccccggtcaccagagccaggacgggcttatccaggatctcactcatagaggaggagaacaccggcaccccgtaccgggcgaacaccgactccaccaaatcctgataggtcctgtaggatcgggctaccaccccgatgtcccggaagcggagcccctcccgccgcaccagctccaggatgcgggccgcagtccactccacctctccccggggcgtccgggcggcaaagagctccactgccccctccggctcccgctccaggccgggagcgtgggcgaacagggccttttccaggaagtccagatccgccgcccgtcctcctccctccgccgccaggtgctccacctggctggggacgcggcgctcccgggccgcccgcagcagctgggcggccgttcggcgggcgggggagaagatgccggtccccccctcatcctcctccagatggtcacaggtgagggtgaccgtcaccgaatgggcctgctccagcaggcgggagagcacctctatctgctggggagtaaagtcggtaaaaccgtccagccacaggtccctccccgctgcccaggggcagtccttcagcttctccgccgtccgggtcagccggtccctggggtccagggccacctgggcagtgagggcatcgtaagccccgcagatcagggacaggtcccgcagcttctctccctccggtccctccgcctcacagcccgcccgctccaagtctgccggggagacccggcagctcttcagctcgtctacagtggcgatcaggctgcggaggaaagaggcccgccccgctgagcgggcgcacacggtgagctgggccgccaccgacttcactgcccggtgcatcagcagcaggcggccgcctgcgtccagctccgcttctcccagccctccggccgccagaaagacccggttggccaggcggctgaaggagagcacctccgcatacagggatactccgttcccccccaccttgcacagcgcccgctctgcctcgtgggagttctgctccggcaccagcaggacctgggggcgctccgcccccgccccgcacatgcggcggtagacggcggtagtcttccccgatcccgcccggcccagtatcagcttcagcacggtcctcgcccctctccagcctgtttttcagctatacgcattgtagcacaaagccccccggagagaaagtaatttctcttcgggggcccgcttgtccctcccgtccgccggacagctgggtctcatttcagtcccttccgctccagcagttggatcaggctgctgttgaccagcttttgggccagcagttcccggaactggacggtcttttccttccgctgtcctctcagctcctccagacgccgggagatggactgctgctcctcctccagtccacaggccaggtcctcaaaggccgccagccgctccagcgccgcctccaggcgctccgtggggcagaggacccgccccccttcccgcagggtgtaccgctccatattcttctcctccttattcatggacttccgccccttcttctttctcccaagcgcagggaaatttacatgtatatgaaacgctccaaagcatccagagatcgaactcattttttctgcgtatgaacagcggccagcctcaaatcatggaacaaaaatggccattttcctgaaatgttaacatacgttgcttgcggcaacgggccgctctctatataattatggcagagaacagatggaaggagaccatcccaaatgctcaacgaaaacataaaagcgatccgaacatcaaaaggactttcccagcaggagcttgctgtcaagctgaacgtggtgcggcagacgatctcaaaatgggaacaaggaatatctgtccccgactctgacctgctgatctctctgtcggaagcccttgagacccccgtgagcaccttgctgggagaaactgtcatggagtcggacgttgataccctgaaagccatctccgcaaaactggaggtgataaacctgcagcttgcgcagagaaaaaccacaaggaggcgtatcctgcattggctcctcctctcattgtgcgcggtcacagcggccatcttcgccttcttgtcggccctgaacagcccttacttaggctgggattacagcgatcccgagaccgctgtaatcggggtggcctttcacgggttggaatggctgttcgtcagagcggcccccatcatcctgatcgccgcgatcgtcgggatcttcttgacacggaaaaagggatagctccccattgggtcagactcactccgctccgggaggacaagggggatcatgggaatggaaaagcccgggccgcagctgcggcccgggctctgcgatcagtcaggactgatggtatagttgggagcttccttggtgatatagatgtcgtgggggtgggactcccgcaggccggcggcagtgatctgcatgaactgggcgttctgctggagctccgcgatgctgtggcagccggtgtagcccatgccggcccgcaggccgcccatcagctgatagatggtgtcgctggtggagcccttataggggacgcgcccctccacgccctcgggcaccagcttcttgttggactcctggaagtagcggtccttggagccgtgattcatggcggccagggagcccatgccgcggtaggtcttgaactggcggccctgatagatctcggtatcgccgggggactcctcacaccccgccagcagagaaccgatcatgaccacactgccgccagcggcgatggcctttacgatatcgccagagaacttcacgccgccgtcagcaatgatgggcacaccatactgggcggccacgcaggcggcgtcatagatggcggtgatctgaggcacgccgatgccggccaccacgcgggtggtgcagatggagccggggccgatgcccactttcacacagtcggcgcctgcctcgatgagggcgcgggtgccctcggcggtggccacgttgccagcgatcagctggacctccgggtagagggccttgatgcgcttgacggtctccagcacgttctgggtgtgcccgtgggcagagtccaggttcagcacatccacgccggcctccaccagagcggatacccggtccagcacgtcggcggtggcgccgatggcggcacccaccagcaggcggcccttctcgtcacgggcggagttggggtacacctccgccttctcgatgtccttgatggtgatcaggcccttgaggcggaaatccttgtccaccaggggcagcttctcgattttgtggcggcgcaggatctccttagcctcctccaaggtgatgccctcgggggcggtgaccaggttctccttggtcatcacgttgtcgatgagctggttcatgtcggtctcgaacttcatgtcccggttggtgatgatgccgatcagctttccgttgtcacagatgggcacgccggagatgcggtacttggccatcagctcgtcggcctccgccagggtgtggcccggagccagccagaaggggttggtgatgacgccgttctcgctgcgcttgaccatatccacctgctccgcctgctggctgatagacatgttcttgtggatgacgccgatgccgccctcccgggcgatggcgatggccatgcgatactcggtgacggtatccatagcggaactgataagcgggatattcagccggattttctttgtcagattggtgtgcagatccacatcagcgggcagcacatcgctggcggcggggatcagcagcacgtcgtcaaaggtaagcccctgcttgacaaacttctgggaagcgtcctggttgaccatagttcacagctccttttctctccaatagcaaggaatgatgttgggatttgaggatcatattttttctattgtaccccccgcctcgcgggcttgtcaatgaatctcttctccaaatttcgcggccgcttcaaagtgagttttgcccgcctcgtctacacccttcacaaagtgctgccccccctgttctcccacctccagagtcagcacatcacctgcccggctctctgcggtgtatccgatctggaggtcgctcagaaagcagctgcggggcaggccctccagccgcagggcatcgcatacgaagtcggcgtagcgggtgttgttcacatggccgttgatgtcggtgtcgctgtaccccatcctccggcggtcccgctcctccatctctccaggcatgcgcagcttggagagggtcagctgcttgcacagcccgccgccctcggtcccctccagctcccgcatctgggacaggcggagcagcttccggtcctccacaccagccagcacccaggcggacaccgcctcgcccactgggacgccgcccgccagcaggtcaaaatcgcggtacatcagcgccgtcttactgccccggtgccaggtgcgcaccgtcaccttctcctcccaccgcagggggcggtccagacggaaccagatccgggccagcatccagaaagcgtggtactccagggtcttctcccgcccgaagcccccgtcctccgcggccagggtggccgcctcctggagatagcccagcacggcggagggccggcaccggccccagccgtccacatcccggctgtccaccgtcatctcatattcaaaaaactgtcccatgccgtttcacttctttccccggatcaatatggtatttttacagcagatgtcgtcgatgtcgtccgccgtagcggccgggatgcgcatctgggcgccgcactgggcgcagatgaggtcgatggagctgtaattcaccttcagcttccattccctggagccgcaggcgcaggagacacctccccgggccgcgatgtccttcacctcggagagcacctcgtgcatgacgatctcgtccaggaacgcagctttctcctcggccgcctgctcctccttcagcttatcggccgcccgctccagccgggccgtagcggcaaagacagggccctcctcccccacgtagcagcagtccaggccggaggccgcgcaggagaaggccagggccttctggtgcaggaaggcgtgggtggagcagctcacccggtgttcccggccgcagaacaggcagggcacctccaggtccacatggtcgtccacaaattccacccgcagctccgatctgccgcaggggcatttgatatgggccgtggcggcagccagggaaaacaggtcccgctccacaatgaccgactgacggcaggcggggcagatataagccagggtacgctttggctcttcaaccgacataacgaatttcctttctgtggcagtccagcctccgcccctgatgggccgttttcgccggacgcaggatctctgattttttattatatcaattttttcctctttttcaactccgtcaatttcactacacactggacaaagcagaaaaatatcataaaaaaacagaaattttattcttccatgtctttctgatattctaatatatcccctggctgacaatccagtgctttgcaaatggaattcagtgtagaaaagcggatagcacttactttacctgttttgattttagataagttgacatttgcgatgccgaccttttcagatagttcgtttaggcttatttttctatctgccatcattctatcaagccttaaaattattgccatatcatatctcctttacagcgtttcatccacctcttgctgcaactcacatccatagtcaaaaataagggagatacaaaacagaacgagggcaaacaaaccactcatgaagaattgtgaaaatgccattttaaagacagagaatgcagaaaaaacagcaaacaccaggacatacaatgctattttccgtatctgactggctgtttcagctgtaaaaggagaatttccttttccgatacatccaaacaatcttttggcgttatacagggctaaaaagatacagatgagcattccaagacagcaaatgaaaaagaatgcgcattgtccaaagctaagagtttgccctgccttaacagcagtttcccacgcctggcggaacatttccggcaaaaaaagccgggcacaaacgataaccacgatccctgcaaataacgatacacttaatacgccgaaaacaatgcagacgatgttaagaagtatggagataaaatgagcatatcttttcaacgctttttctttcataaataaaggctcctttcatttcttaacacacagtatatcactcaacatatttttgtcaattattttttaatgataaacataaaataattatcttttatcgtttcagataaagtaaaaaggctttcaggtcctccgcttaatatcgctgtggccagaagggcgcctcggatcgagtcagctctcttccgtgccccagccccgaacaaaatcggaattctcccttgatggcgggtgaaaaatatcgtatgatggaaaaaacgggccctgtccggtccgatcttactctcttccggccgctcctctaccggtccgggagggccaggaggcgatcccatgtctgttgtctatctccatggcttgggccaaaccccggccagctgggagtcggtgctccgcgtgctggggcaggagtcaggcggcctctgtcccgatctcttcggtctgattcggggaaaggaggtctgttatgaaaatctctatcaggccttctcacggtactgcggcgcccttcccgcccccctcaccctgtgcggtctgtccctgggcggggtcctggctctgcaatacgggatcgagcattcggaccgggttggggccctggtcctgatcggcacccagttcgtcatgcccaagggcctgctccggctccaaaacgccatgttccgcctgatgcccgggtccatgttttccgccagcgggctgagcaaggcggatacgatgcgcctgtcccgctccatgatggccctggacttccgaggcggcctggcccggctccgctgtcctgtcctggcggtctgcggcacgggggaccatgccaaccagaaagccgcccggcagctctgccggctggtgccccagggggagctggccctcatccccggtgcggggcacgaggtgaacacagacgcccccgaagcgctggcggaggtcctcgtccggttcttacgccccctcccctgacccttccatctcttctgcaaggaggttttccatgacccgagtcctgcttctcaccaccgggggcaccatcgcctcccgccggggcgaccagggactggagccccagatctctgcccggggcctgctggaatatatgtcggacctgcgcgcccactaccacatcgacgcccgggacatcctcaacctggacagctccaacatccaggctgaggagtggcagaccatcgcccgggcggtgatggaaaatctggacgcctatgacggcatcgtcatcacccacggcactgataccatggcttacaccgcctcggtgctgagctacatgctccagaatctcaccaaacccgtagtcctcaccggctcccagatgcccatcgacaacctgctcaccgacgcccgcaacaacctctataccgccttttccgccgtggactgccgcatccccggcgtctccattgcctttgaccacaagctgatccggggctgccgggcagtgaaggtgcgcaccatgggctttgaggctttcgagagcgtcaatgccccctatctgggggaagttttcgccaacggcatccaccgcaacgagagcgccatccgccccggcgaccccagccgccccacccggctgctggatcggctgtgccccgacgtctttctgctcaagctgatccccggcaccaacccggcggtcttctccatgctgatggacatgcactaccggggcatcgtcctggagaccttcggcgccggcgggatgcactttctccgccggaacctgctggaccggctgagcgagctcactgcccatggggtgtcggtggtggcgtgcagccagtgcctctatgagtccagcgacctgtccatctacgaggtaggccagcgcctgctggagtgcggggtaatccccggccgcgacatgaccacggaagccgcggtgaccaagctcatgtgggccctgggccagaccgtggacccggcgcagggccgcgatatcttcgactccgacctggccggagaggtcaccctctaaaaaagtttttccaccagctgctgcgcatgtcccgtccgccgtattttgtcggacgggacatgcgccttttttcatattttttcattctcggggcaagctacctctgattttcaacagcacggaggtccttgacgccatgacaacaaaaaaactgggccgtcaaacggtggcccttgccaacccgcccaccctggccggacacgccaatgtagtgggcaagaaggaaggggagggccctctggccagctccttcaacctcatcggctctgatgacacctttggggaggccacctgggagaagtcggagagcgccatgcagaagcaggccctcgccctggcgctggacaaggccggccaggctgcctccgccatggactggctctttgccggcgacctgctcaaccagtgcatcggctcctccttcgccgcccgggggcaggacatcccctttttcgggctctacggggcctgctccaccatgggggagggtctggccctggcctccatgaccttggacggcggcttcggggagtgggcggcggtggtggtctcctcccacttctgtacggcggagcggcagtaccgcacccccctggagtacggaggccagcgcacccccaccgcccagtggacggtgaccggcgccggggccgccatcctggcccgggaggggcccggtccctacgtcacccactgcaccctgggcaagatcaccgacaaggggatcactgacaccaacaacatgggggccgccatggccccggcggcctatgccaccctcaccgctcactttcaggataccggccgggagccggactactacgacctgatcgtcaccggcgacctgggcaagctggggcgtgagctgctgctggagctgttccggcaggacggggtggacctgtccaccaaccacaacgactgcggtctgatgatcttcgatctggaaaatcaggacgtccactgcggcggctcgggctgcggctgctccgcctcggtgctcaccggctatctgctcaacgggatgcgggagggccgctggaaaaatatccttttctgccccaccggcgccctccactcccccacctccgcctttcagggagagtcggtgcccggtatctgccacgccatagccatctccgctgtcaaatgatcccgtcatgtccaagaaaagaggtcactgatatggaatatttcaacgcgtttctctgcggcggcatcctgtgcctgatcggacagcttctcatcgacaagacacctctcaccccggccaagatcctggtcctctatgtggtcaccggcgtggtcctgggcggcgcgggcgtctaccagaagctggtggactgggccgggagcggagccaccgtccccctcaccggtttcggctatctgctggccaagggggtgcgcaaggcagtggaggagcagggcttcctgggggccctcaccgggggtgtcaccgcagcggcgggcggcatcaccgccgccatcttcttcggcttcctggtggcgctgctcttcaagtccaagcccaagagctgattcccccgctctgggagctcttctcctcagagcaggatttttctggctttttctccacctgtgtgctacactgggcacgaggtgataaacatggagctgcaatttgagcctacccgggtctacgggctggacggcgggggccgtctggtggctgagatcacattcccctgcacccagcccgggatctataccatcgaccacacctttgtggacccctccctccgggggcaggggatggcggataagctggtccgggccgccctggagcagatccgcaaaaacggcggcacccccgccgccacctgcacctatgctgtctcttggctggagaaacacccggagcaggcataaaaacgcgtgaaaaagcggcggagctccccccagtatggctttctccacaaatgaaacggcgccccggtcagtccggggcgccgttctcatcctcaaattcctcccggcggctgcggaagaactcgtaaaaggtgcggacactgggcacctgggtccagcggcagggctccaccgggtcctggtccaggtcatagatcttcgccccccgcagggccagcaggaagggggaatgggtggagatgacgaattgacagcggtaaaagcgggcggagtcctccagaaagcgggccagctccagctggagccgggcagacagactgttttccggctcgtccagcaggtagagcccgccctcctggatctccctggtgaagtaaaggaatgcgctctccccgttggaacggcccgggatatccttcatcacccggtcccgcacatagtgggagccggtcttgcgctgggcctccaccacctggcgcaggcggtcatagtcctccagagagcgcatctgaaaacgggcgtaccgggcatccgcatattcctccagcagttcctttctcctgtgctcgatgttctcattcatatatcggagatccagcaggccgtcgaacacatcgtcactggtgatgatccggctgttctcaagctccgccgccccgaaggcccctgccgtctccgcctcgcagagatccagatagggctgaaaaaaggagctccggttgaacacagtcccgcgacgcagcttcaacttctccgccatcagattgagcaccgtggtcttgccgcagccgttcccgccgcacaggatggtgatgggctcaaaggtcagaggagggacctttcgggacagaaagatgccgaaggggtagcggctgccgtaacaggtccgtttgttctcgctgtcacgtgccaggaagctggcctctgccccctgccccggcagggagaacctcctcagataaagcatgtctttcccctcctttttccatcctaccgcagaagcagccccaaaaacaggacttttacagtaagggccccgcacaagctgcggggccctttgtcttatttcttgctcttcaaatactcgtcgatggcctttgcggcgtgcttgccggcccccatggccaggatgacagtggcggcgccggtggcggcgtcgccgccggcaaagaccccctccaccgaggtgtgtcccgcctcgtccgcggccacgcagcccttccgggtgcgctccagaccgggagttccgccgtagctcatggggtttggactggtccccagggccatgatgacggcgtccgcctccatggtgaactcactgccctggatgggcaccgggctgcggcggccggaggcgtccggctctcccagctccatccggatgcaggtgatggactccacatgccccttctcatccccctggatagagacagggttggtgagcaggtcgaaaatgatgccctcctcccgggcgtggtggacctcctccgcccgggcaggcagctccgcgtcagagcggcggtaaacgatgtggacctctgcccccaggcgcttggcgcagcgggcggcgtccatggccacgttgccgccgcccaccaccgccaccttgcggttgtggaggatgggagtctcgctgtccggctgataggccttcatcaggttgatgcgggtgaggtattcgttggcggagtacacccccaccagggactcaccggggatcttcatgaacatgggcagcccggcgccggagccgatgaacacggactcatagcccatgtcgaacagctcggggatggtcagcaccttgccgatgaccatgttcagctggatctccacccccatcttctccaggttggccacctcccgggccacgatggccttgggaagacggaactcggggatgccgtaggtcagtacgccgccgggcaggtggaacgcctcgaacaccgtaacgctgtatcccatccgagccagctcgccggcgcaggtcaggccggccgggccggagccgatgaccgccacctttctgccgttcttgggggcggtggccgtgttggccactccctgctgggcggcccagtcagctacgaaccgctccacccgcccgatggccaccggctcccccttgatgccccggacgcacttgccctcgcactgattttcctgggggcacacccggccggagatggcgggcagggcgttggcgttggacaggatctcataggcggcagcgatgttcccctgggccacctgatccaaaaattccgggatggggatgcccaccgggcagccagacacgcaggccgggttcttgcagtggatgcaccgcttggcctcgttcatggcctcctccagggtgtagccccgggccacctccaggaagttctggttccggacctgggggtcctgctccgccatgggggtcttggtcagctgcatgttagccattcatggcacctcctcccaggcggcacaggtggtcctgcttccgccgcgcctcaaattcccgataggtggcgttgcgggcgatcacctcgtcaaagtccacctgatgcccgtcaaagtccgggccgtccacacaggcgaatttcacctcgccccccaccgtcacccggcagcacccgcacatgccggtgccgtcgatcatgatggggttcatgctcaccgtggtggggatgtggtacttctcggtgagtttgcaggcaaatttcatcatcatcaaggggccgatggccaccacatggtcatactgggccccgccctggatcagttcctccagcttgccggtgacaaagccgtggtaaccgtagctgccgtcgtccgtgcatatgtacaagtcggtggccgcccgtcccatctcctcctccaggatcacgatgtccttggagcggaagccgccgatcaggtccacctgggccccggcctccttcatggccttggccaccggcagggcgatggcacagcccaggcctccgcccagcaccgccacccggcggtagccctccacgtgggtgggggtgcccagggggcccacaaagtcgtggaggcagtccccctcctgcagctggtccagggccaaggtggtgccccccaccttctgatagaccacagtgacctttccgtcctgggcgctagagatggtcagggggatacgctcccccgcctcgtccacccgcaggatgatgaactggcccgccttggctttggcggcgatcagcggtgcctccactgaaatctgcccgatctccggggtcaggctccgcttggccgcgatgcgatactgttctttcacactctttcctcctcacaggcggtccctgccgcctgggtcttgattctgatgggcggatgcccgcgccggcatcctatccccggtacctcttccggccgccgccgtagcgccgccgccttacccgccggaccagggcccggaccagcagcaccgccgccgccaggaccgccgccgccgccagcagcgtgaccagggtgatccagttgggggagcggagcagctcgatggggttccagctgcggtccaccgacttgcgcccgtcccccttcggcatgccgtaccgctcgggcaccccttcatccccgaaggactgaaggtaggcggccagggcataccactccttgatctcgctgccgttcccgtcccggagcacccgggtggcaaaatcggtgatgggcactccgttctcgtccttgggctccagagacagcagccccagggacttctccttcaccgtgcccagcatctgggcggagtacatcccggtcaccacccggtagagctggtcgtcctcgatccgggacatctcacgctccaacaggccggtggcgaaggagggctcctccagccagcaggaggtcacccggttgaaaaacatccggtgggggttgaaggtgtacaccatccccgacatgtacagctgggccgccggcatgataggggtcaccgaggcgtccacctctgccgccgcccgcagctccttcccggtgaggtagcaggtcaccagtggaaaaccagaggtcccatcctcccccactcccatggagagcacatcaaaggcctgggagacggtgatatcccccgcaggcagatcggcccgcagcacgccgtcggcagtgactgccaccgtgggcacccctgggtcctccgctgccagctcccgcgccgcccagaggaaggcgtccgccaccagctcccccaggggatttccctgctggacgcccgactccggccgcgtcagggagaagtccgcccgggccagcacctggtcataggtcaggtggtagcgggccagataatccacccccacctgggccttccactcctccaccagggaggcgatctcctggtcctccggcagggtctggtcgatagggatcagctggtagtccaccagggtcttgcttccgtcctccgaccactccagagtgatgctccccagattctcgcagtagggcccggcggagacgatataggtatccccctccacaatgggctgggtgagggtggtgtgggtatggccagagaggatcaggtcgatcccctccacctccctggccagctgctggtcctccgacttccgctcccgctcgtcggtcccgctgtgggacagcgcgatgataaactgcgccccctgctcctccaggctgtccacgcagcgctgggccgcctgcaccgggtcctccagcgtgaagcccgaagtgggggcgcagtcgtccgagtcggtgcccatcaggccgaaaatgccgtaggtgaccccgccccgctccagcagtagcgtgtcggtcacgccgtaggccgacatggcccgctggatgtccagctggtcaggaccaccggccgatggggcgtagttggccatgagcagggccggaagcggatctccgctggtgtaggccgccgtgagcatctgggcaaagcccaggccagtgtggtcaaactcatggttgcccgcagtcgtggcgtcataacccagagcgcccatggtccgcagctccgccgcccgggtggtgtagagggtctggaccagagagccgatggagaagtctcccccgtccagggtaagagcatccgggtggagggcccgctgctgctccagtgcggaggccagccgggcatagcctccggactccccgccgtccgccctctccaagggcaggaagtgggagtggagatcatgggtaaagagcaccgtggtctggtggggcccaggggccggctccgccagaccccagggaatcagcagggtcaacaggagaagcgctgtgagcacagcggtcattctccgccgcagccgcctcatgaaaccagcctcctttccgtctgctcccgtcattctgcaaaaaccgctttgcaggatttcattttgccataaaatcagacaaatggcaatatcaaagtcttaattcctcacctccgcctctccttctaatggggagacagacggatcaggacagccacccgccctctccggtcactatgatactccaaaatccactttgttggtattgtatgtttcgacaaaatcccctatcattttatgtggggacacttgaagcgcagccccgccatttggaaaaggaaggaggggtagacatggatctcacagagaacaggcgggcagtggatgccttcacatacggagcgggtacatcggggtatccacctcaggagctcctcgccgccctgctgacgctggatggcgcctccctcacgtccggagaggtggaggagctgcgccgcacctgtctggcccagggcggcacacaggaaaaccccggcgggacatctcccgccggggcccgatagaggcgttcacaggcacttcagatacttgccgtagagggtcatctccagctcgtccccgatggcgtggacctgctcctccgagatccagccctcatagaaacccagctcctccaggcagcctacatagcggccggtggtgtcctggatctccttgattgtctgggccgccgccagcagactgtccgccgtgccggcgtccagccaggtaaaatttttttccagcggtatcacctggagctgccctcggctgagatactccagattcacatcggtgatctccagctctccccgggcggagggcttcagggctcgggcgatctccatcacctgctgatcatagaagtagagaccgggcacgatatagttggacttggggtagcggggcttctcttcaatggaaatggcctttccattcttgtcgaactccaccacgccaaaggggcgggggtcctccacgtagtagccgaacactgtggcggccgcgggactggccgcagcctttttcagggtggctcccaaggtgggggcgtagaaaatgttgtcccccagcaccagacagacccggtcgtcccccacgaattcctgcccaatgagcagggcgtccgcgatcccccggggcaccggctgctccgcgtaggagatcttcagaccgtactggctcccgtcccccagcagagcggtgaaggtggcggtctcgttaggggggacgatcaccaggatctctgagatcccagcctgcatcagaatcgcgatggggtagtagatcaggggcttgtcgtacacgggaagcagcggcttgcaaaccggcttggtcatgggatacagacgggtgcctttccctgcggccaatacgatccctttcatgcggtcactcctcctcttccatccggcctgttcagatgattcagtttaccatgttccctctgccttttcaaggtgatttccattaagacttccttaaaagtgtgtgagagggccgcagtgcttctcttccccctgcccgggcggtcagaaaggctccccgccagccggaactggctggcggggagtcgttgcttatcctctgaatttctgttgtcagcccaggactaccagcaggtcatcggtattgacggcggtgcccactgtggcggatacagacttgacggtgccgtccaccggggcagagacctcgatctccatcttcatggcctccagcaccaccagtacatcgcccgccttcactgcctggccgggcttgcactccaccttaaaaatattgccgggcatgggactgtttaccggcgtctcgccggcggcaacagcagtgagagcaggggcagcggcaggagcagcggccggtgccggggtgggcgctgccacgggagcggcggccgcaggagcggcggcagccacgggggcggcggccacaggagcggcggtgggggtatcagccttggccaccgacacctgatagggcttgccatcgatggtgatggtgaagtttccggtgcagtcctcccggtctcccatcttcagataagagggctggtaggacgcggcaaagggctggatggcacggctcacatagccgggagtctggggcacgggcaccgcggcatagtagacggggccggcaaagggcgcgcggggagcgggagccgcagcaggggcggcgggcgcagcaggtttcacaggggcagcctcctttttcttcttgaaccctgtggcacggtcctcaaagaaggccatggccacctgggggaacgcgatataggacaggacatcctcgtcactcttggccttgtcgcccagttccttcttggtcttttcaaactcgggctccagggagtcggcgaaacggcctttcaccacaggggtgttgcccaaaatcttcttttgaatcttggcatcgatgggggcaggggtacggccgtactcaccccggcagtaggccttgatttctttgcccaccaccttgtagcgctcgccggccagtacattctgcacagcctgggatcccaccatctggctggtgggggtgaccaggggcggatagcccaggtcagcacggaccttgggggtctcggccaaggcctcgtccagcttatcgatggcgttcatcattttgagctgggagatcagattggacagcatgccgccggggatctggtaattcaggcactgggtatcggtggccatggagatggggtcgagagtcccgtcggccaggaagtcggcccggacgcccttgaagaagtcggccatcttgacgaggaccttgtcgtccaggtccacctggtagccaagctggcgcagggcgtaagccagagtctcggtggcaggctgggcggtgccgccggagaagggggagatggcggtgtcgatcacatcggcacccgcctccaccgccttcagataggtcatgaacgccaggccggtggtgcagtgggtgtggaccaccaccggcagttcggggaccgcgtccttgatggcggagaccaggtcataggcgtccttgggccccatgatgcccgccatgtctttgatggcgatggactttacgcccattttctggagatccttcaccatggctacgttcttttccagggtgtggaccgggctggtggtgaagcagatggtaccggaggcgtgggccccctgcttgacggtctcgtcgatggctacctccaggttgcgcacatcgttcagagcgtcgaagatacggatgatgtcgatgccgttcttgacggagtactccacgaatttacgcaccacgtcatcgggatagtgcttatagcccaagatgttctggcctcgcaacagcatctggagcttggtattgggcatcttggcccggatcttccgcagccgctcccaggggtcctcctggagataacgcaggcacacgtcaaaggtagcgccgccccacacctcagcggagtagtagccagccttgtccatggtctccagaatggactcgaatttgtcataggggaggcgggtggcgatcagcgactggttcgcgtcacgcagcactgtctctgtaaagttgatctttctcatgttcatctgacctccgtgatgctttttcaaagctggattctatgaaacataaacaggggcaaagacttttccggcgtcccttctggacggcagaaagggccggtttccccctccggcctgaatcttatggttattttagtatattttttgcccgggtgcaagtctttctgtgcaaattggcccactttatccagttatggagcaagattcagcaaccggtcctgatcgggcagggcatcggcccctatggtacacgccactctccttctccacgcaggaacggggcctgcccctccgctgctccccggtcatcggcgcaccggggccgcccggcctctcctcaggcacggccctgcctgaaacgcagagaccgggagcctgtctccccgacccgcagctctgccgcggctgggtacaggctcccggtccagtcatccggagatccgtcagcgctcactgcataccacagcttccttgcgggcagcaggctcactctcaaagatcatgtcgtcgatgtctttatcctgacgcatctgattccagatactgttcttcttctcacgaagcatcgtcatgtcgatctctcctttccatgggaacgtcattttatcatttcaggcaacaaaaacgccaccgctgcactactgcaaacgatggcggagaaaatcaggctgaactggaaaaacaagatttttgggggtcaccccagatcatgttggctcctatgcacagtctgcacacaccgcttgcagtcccacctctctccctgggtcacataacgctgagatctcatctgtgctcacctctttctccgccgcccgtttctttggcagctgtgtctctcaacaggcaggacaactttcccctttttgtccattccgacgcttttttctccatactgccggagcgtccagcgcctcccgccggctgattgttgttattgtaaacctctcttctccaaatgtcaagaaaattttttgtaaaaaatgaaggcctg

SEQ ID NO: 13510 - DNA, 21818 bp, Unknown
  gut microbiota DNA sequence
gattaagaccacttttttagaaaagagtaggatttccagatcaaatctggtataatttacaatataggcagggggcattatataagtatggtgaaatataatcgatgaaagcgggcaaccccataagcagatagacccatatatgaaaggccgtttgcaaagcaaattgatgcatgccattacgaagaagtagcaaaaccggggaatgccgtgcaagggtcaagatgaacgcttcgcgcccttgccggcattccccggttttgtccgtcctaagccaacgctgctttttatggaatcagccccggacaggatctctgtccggggctgattccttattggggaggcttttgcctcgttttacgatggttcgttctgcggccccgggagccgctgtcaatcccgattcaaaaacagagtatgctctcattttatgggaactccactctcagcccaccgtcttccaatgcttgtccacgtggttgaggatctcacagccctcctccgtcacaagcaccaagtcctccacccggaccccgaattgaccagggaggtacactcctggctcaatggagaagatcattccaggcttggctaccagctctgtgactgcacttacatcccccttctcatgctctgtctggccaataaaatgccccaggcggtgggtgaagtactcaccatagcccgccgaagcgatatgttcccgggccgcgatgtccagctcccgcagggggatgccgggacggatcattccctccgcgatctcattggcactgcggaccaggtcatggatggccgcgtatttggggtccgcagtcttgcagaagaaggtgcgggtcatatcggagcagtaccggtctttccggcagcccatatcgataacaatgcagtctcccgccttcaggcgggtctggtccgcctcatgatgggggtcggcggcgtgggcgccgaatgagacaatgggctggaacgccacagcgtcgcagccctccgccgcgtactggcttatgatatagtcggccacttcccgctccgtgatcccctcctggaggaaggccgccgcccgttccattactgtgtcattgatacgggaggccgcccgcatcagctcccgctccgcctcgtccttgcaggccctggcgtgatccacacagtcggatgccactatataccggctgtccggattgcgctccatcaggggcagaaggaaccgggccggccactccttgtcgatccccagggcgctctttccgtccacatgggaggccaaaatcgccaccgcatcatcggtgtcggaggaccacacctgctcatagggagcttccggcacagggaacagcctgttcaaaaacagcttgtggtgcccgtcccggcggagataaaaagcaaacaggcgctcaaagggaaacacgtcatacccggtgagataccagatgctgtctgggtcagacaccagcatctggtccagccccatctcctccatggagtccagcactcttttgatacgttcctgatacatggatcatcagcctttcttcttcaagatcacggactctaccagcgccggagagagcagctccctgatgatcctcaccccggtcttcagggactccaccggcgcatattcaaaccttccgtgggcgttgtgtcccgcgctgggcagatttgggcacggcagacccatgtaggtcaggacgcttccatctgtcccgccccggatgggcgaatgggtgggggcagcaatgcctgccgccttcatggcctgctctgccagttccaggatctccatgtgatccttcaggacctcatgcatattgtaatactggtcctggagctccacctcggccgtgtgcgccccatagcggcggtcaatctctgccgccgctttctccatcatcgctttccgctcctggaacctctccatgctgtggtcacggacgatatagatcatgtcggctttctccacagtcccgtgcatctcctggaggtggaaaaagccctcgtacccctctgtatgccccggtatttccagggccggaagcagcgcgttgtattccccggccatcaggatggcgtttttcattttatctttcgcagtgccgggatggatgctgaagccgtgaatggtaaccgtggccttggccgcgttgaatgtctcgtactcatagtccgtgatatccccgccgtccaccgtataggcaaaatcagcgccaaagcctttgacatcaaagccgctggcccccatgccgatctcctcatccggagtaaatccgatgcagatcttcccgtggggcacgccctcagccagcagctcctccactgcctggaggatcatggcgatgcctgccttgtcatccgcccccagaagggtggtcccgtctgagcagaccagatcctgccccacaaacttttgaagctcggggaactgggccgcctccatgacgatcccccgctcccggttcagcaccacgtctcccccttcgtaatggatcacctggggcttcacatccttccccgtcatatccggggtagtgtccatgtgggcgatcaggccgatggcgggcagatgctcacagcccggtgaggcgggcacagaggcatacacataacacttctcgtccagcaccgcgttctcgatgcccagcccgtggagttcctccaccagcagacggcccatatcgaactgccgctgcgtgctgggcgtcaccgctctcccggcatggtagtcgctctcgctgtacaccttcgcatagcggatcagacggtctacaactgtatccattctatgaccctccttatccttctcagagcagattctccggattcaagcacttcagctcctccagcacaaacaggccgtccttccgaatgagcacatcatcgaaccagatctcaccaccaccgaactccggcgtctggatctggatcaggtcccagtggacggcggaatgattgccgttggaggcgttgtcatagctgttgcccggcgtcagatggaagctgccagcgatcttttcatcaaagaggatgtccccgatgggatgggtgatcactgggttcaccccgaaggcgaactcaccgatgtaccgggcgccctcatcaatatccaggatctcattcatatatggggtgttgttgctggtggcctttacgatcttgccgtcccggaactccagatacacgtcccggaacaggaagccgtcataaggggaggggcagttataggtgatatgtccgttgaccgaatcccgcaccggcgaggtatagacctctccgtccgggatattccggttcccgtgcatggcatagcagggtatgccctgaatggagaaggtaaggtctgtccctggagcgctgatgtgcacccggtctgtccggtccatcagcttctccagatgcctcatagcccgccccatcttgtcgtagtccaccagacaggcccggaaatagaagtcctcatactcctcggtggacacgccggccagctgggccatggcgtcgtttggatagcgcagcacggaccacttggtgtggttgcaccgctgggccaggtggatggggccccagtaatactggcggtaacggcgctgagcctcgtcactgacattgtgccatgcgctgatgttgggcgtggcccggatgtcgatataggcgtccatatccttcatccgctccagttcataggaggcgatctcctccatatgctccgcgtcggccccctggaccagcgccccctccaccccatagtcaaaaatgtggataaagggctttcctcccaccgcataggcctcctggaccagcgccttcatcagtccagtctcgctgccgtggagctcaataaggatcttctcccccttttgcagctccaccgcgctccggatcagaaattgagcaaacttgcgaattctcgggtcctccataatgacagagcacttcctttcctgattttgatcctattgaaaaaagcggggcagaaggatctcttctgccccgctttacgatcacttctcctgatagagcgcatccagggaacgggcggcttcccctttcggtgtcacagcggacacgaccaggatggcaatgacggaggcaggcaccgctacgatggcacactgtatcccatagggcgttcccatcagcgtccagacgatcgttgccagaccgcccaccaggatgccggcaataccggcagccggggtcaccttcttggagaacagcgcgaacaggatagccggcgtgatggccgcgccgtacatggtgtaggcggtcatctgcagagagagcacggtggggaaatagagggtcagggccaccgcgatgacactgaataccacgatggtcccccgcagcaccagcatcttctgcttgtccgtagcgtccttgcggatatatttgacatagatgtcattggtcaggttggtggcggaggagagcagatagctgtccgccgtggtgacgataaacgccatgcaggcacacatgatcagcgcaccgaaggccatcggcagatagtccacggatacctggaagatcacgttggagggcgtgtccagcgtgggatacaggcgggccgcctgggtcaccactgcgatgatgctgacgatgaccaggatctcgccaatgaacatgccgatgttggactttttggcctctgtgctgtttttggcggaggcaaagcgctgcagcatgttctggtcgcccagcatcagggccagggagggcaggaaatagcccagcagttcccaaccggacatgccgccggtgagagtggtcttctccgggggcagcacagcaccctgcgcgtttgccacactgatcaggatggggatggcaatgaagaatccgccgatcatgatcagcgcactgatcgcgtcggagtatgccacggataccagtcctccgcccactgtgatgaccacaataatcgtggtgcagatgacaagtgccagcccacgggagatctccacaccgctggagctgcacagcaggaccagaatgtcggccgccgccttcagctgagtggccaatacgcccacataggccagcatgacgcacaccgcggaaatgatgctggcgctttggccgtaacgggcgcccatgatctccgggaccgtgaccttattggacttgcggaccttgcccgcgatgaaatacagcaggataatgccgatagggggcgcggcaaaggtgatggcgcccacccacgggccgccgttgtaaatgatgctggcatttccggtgatgccgcctccgccgcaccaggtggccagcagacttcccaccaggatgatgaagggtatccggtggccgcctgtgaccatgtcgtctgcagttttcactttcttgtgcgcaatgaccaagccatagatcatcagcagaaacaggtatgcaccgatcgcgataatatagctcatggttctctctcctctctgttcacacacataatagaaaattttaactgactaatgcgctgatgtcaagctttattcgccccccttgctttttcggctaaaaatatataaatatatagaataaattttcgttctatacagccgcagctttctctgggcccccaacaagtagttgccgcagaagcacctgtccgtaaaatattatctctcgaagcctatagccatgtgtctcagctattatcttatgccgaattatgccgataacttaaatggatacccactattaggacgttaatacagagagaacgtgtggaggaagaaacaatgaggagcattaaggcaaaaatattggtgtccatggtcctaacattggcaatttccctgatcctggtcggcggcgcctcctgtatcctgagctataggggtacacagtcgacgctggaggccagcatgaaagaaatggctgttgtggctgctgaccgggtgtcgtatgaactccaggcatatcggaacatcgtgggagaaacgggaagtactgcacgcctctccaacccggagatcaccctggcagaaaagcaggatctgctccagcaaaaggtagatacctatggttttcagcgttataacctactgaatacccagggccgcagcctgatcgacgggtcaaattacagcgaccgggcctatttcaaagccgcaatgcaggggaacacttatgtctccgagccattgatctcctctgttaccggtgagatgacgatcattatttccgctccagtctggcaggatggacaagtggggggccgggtagctggcgtggtctactttgtgccccaggaaacattccttaacgagattgtcagcaacctccagataagtgaaggcggaacagcttatatgctggatgccactggcaacaccattgcccaccgcaatctggaaagcgtccgcaatcaggaaaataccattcaagatgcaaaaggcgataaatctctggccgatttggccgcgatcgagacggatatgattgctggaggcaccgggttcagccagtacagctatggcggagagacaaagtttactgcgtatgctcccgtccctgagaccaacggctggagcattgctatcaatgccccaacctccgattttactggcacagccatcctggggatcattatcacccttgttctgcttatcgcggctgtcattgtcgcgtccttggttgctctgcggttggcagttggcattggcggccccatcaaggcctgttcggaccgcctccatctgctgtcccaaggaaatctggaggctcccgtacccgactttgaccgcaacgatgaggtgggcgaattggtatcctccaccaaaattattgtcaccgccttaagtaccattttgaaggatattgactatctgctcagccagatgggagaggggaattttgtagtcgattcccgggttccggagctgtatattggagactttgcccccttgctggtctccatgcgccgcatcaagaacaagctgagcgatgtgctctcccaaatccacacaagttccgcccagatcgctgccggctcttcccaggtatcggacggcgcccaggcactggctcagggtgcgaccgaacaggccagttctgtacaggaactggcagctaccgtacatgacatttctcagaatgtggacgaaacagcggatgtatcgagacagtcccgctcccgggccgaggaggccggtggacaggtcatgcagagcaacaaaatgatgctccaaatgacgactgccatggcagagatcacagagttctctaaaaaaatcgggaatatcattactaccattgaggacattgctttccagaccaatattctggccctcaatgccgctgtggaagcagcgagagccgggacagctggaaagggctttgcggtcgttgctgacgaagtacgcaatttggcctttaaatccgaccaagcggctaaggccacgaaagaactgatcgagagttctgttgagtcggtgcaaaatggaaacgccattgtgacaaatgtaacggattcgctccaaaagacaacagatcttgccggtttggctgtagacgatatggtcagggtagctgaaatggtggataccatttcagcggcaatcgcacaggttactgtgggattggatcagatttccgcggtcgttcagaccaattctgccaccagtgagcagtccgctgccgccagtgaggagttgtcctcccaggcgcagctccttgacgatcttgttggacagttccgactcccagacaatgtgcattcttatggcgatactttgggaaactgatcttccacaagccaaaaccttcggctaagccggatgctttggaaccacaaacgcaaaagcggactgctggtgcagtccgcttttgcatttcctatgctccgatcgtgtcacacgcgctccaggggctggtccggcaggctgcccagcgggcggtagacggtgaaatacatggtgaggatacaggctaggccgccgatcagctgggagacggcctccgctgtgaagacgccggtcgtccctatccaaatgggaagaatgacagtgagcggcgcgttgattaccgctttgcgcagcagggagaagaagatagcctgcttggagcgccccagccccacaaagacgccctgacccgccatctggagggacatggggataaacaggcagaaatagatgcgcagcgcagggataccggcctccaccacctctggttcattgttgaacacccggatcagcatgccgggaaacagcatggccacggcccagaaggcggcggcatacgccacggtcaccgccacactgaagcggatggagcggcggacccggctgtactgtccggcgccgtagttgtaccccgtcactggctgggcgccattgctcaggccctgcaccggcatgaaaaacacctcccgcagcgagttgatgatggtcatcacccccacgtacaggtccccgccataggcctgaagggtggcgttgcacaccacctggaccaagctgttggtcaagttcataaagaagccagacaggcccagggtcacgatggatcttacccgtggggcacacagcgccatattccgcaccctcagccgcagaatagcccgccgcccggtaaggaagcgcagcacccacagagcggagcacccctgggcgatcacagtcgccagggccgcgccccgcacccccatccccatcccaaaaataaaaatggggtccagcacgatgtttaccaaggctcccagccccaccgtcatcatacccaccccgccaaacccctgggccgtgatgaagggattcatccccaggccgatcatcacaaagatcgttcccagaagatagatggtcatgtacgcgtcggcatagggataggtggcgtcgcttgcgccgaacaggtagagcaacggctgcttgaaccatagaaagacggcagtgaccgcagccccaaagatcagcagcagggtgaaggcgttgcccagcacccgctccgcctcctcattgtctccctgtccccgtttgatggaacacagcggcgcgcctccagttccgcacaggttggcaaatcccatgatgatggatacgattgggatcgtcagtcccagcccggtcagggccagatgcccaggcagacgccccaggtagacccggtccaccacgctgtacagtacgttgatcagctgcgcggcggtcatgggcagagccagggacatgatattgcgggggatgctccctctggaaaaattatggacttcccctttcaccatctcccgcctcctatggccgcgcttctccgcactccgcctgtccggcgtcttgatcctgccgtgcaggaccccagtcccgcttgctacatggaccattccgccgcagatcccagccccggcacccctgctttttaacagttgtattttataatgatttctttgtaaaatctatatgtaaaacagccaaaaccacgtccgcctccataaactgtcccaacagctgcaggcagtccaaagggtcctttggcaaaaaatatggagttttcaatttcgtcttgtgttcccgtggcaaaatttctctttgtgtgttcctattcttgacggttctgtgtatttatgctatattttaaacgatcagatatggttgggggactgataatggagtattcaaagaattccatttatattgtcggttgtgccaaggctgccgcagaaaacccaattactgtcgccagccaatacctcattctgccgatcatctttgaccgggattcaggccaaatttatgatgcagatatcaattctgtctgtgatattacagagaggtttgtcaaaagccttttggtcggcagaagcatttataccgattacaatgcaattatccaagatattggttcccggtatcttgggcactctcaaaaggcccttattttctgtatccgaaatatcattcatactcttcaggagcagagcatgcttccgcagcactctggctgattttttatttttctcttgacatattattgtcaatattttatactgatgctgaactgagttatctatatattgttcagaactatttattggcccggtgaccccggatgccgttgtaagtaggacgcactgacatttttcaatgtcagtgcgtcttttttgtttccataaccatatcaggagctgtttgatatgtccgttcctcaaacgctgtacattaccggaatctccaggcctgccacagaaaatcccatttcccagcgccatagggttctgtttcttgccttcctggtggatgcgaaaaccggcaccattctggaagtggaggtcaatgcgctctgccagataaccagctccttcctgtctcagcttctggtgggctacagcttttccacacaggtcgaagagatgctccatcaggtcgaggcccgctattggggccactcccgcaaatcgatcttagtcgccatcaagcaggctcacaccaaatggataaactggagttccgggcatcgttctcccctttcataacactcgtcctgtccctgcgaagccggccgcagagggcatgagagatacaagcacagaaaactggcgccaactctcacaaaaatacaaggaggatgtttatggtagatactgtcttatccgggggctggatcatagacggcacacgcacgccccctatcaggctgatttgtgtattcaggacggaaaaattgtcgcgatcagccctcagtgggagggtaattgccgcacgagggtggatgtcaccggaaaaatcgtctctcccggttttattgacattcacacccattctgatacctgtccattttctgctgtctttccggaaagtaaagtagcgcagggaatcactttggagatcgtggggaactgcggcgtttctgccgttcccattctcccatcctgtcaggcggaacagacggcttatcttcgaaagatcagcgagatcccggtgccggaggaggctgtccgtgatgcctctgtccagaaatatgccgctcatgtggcccagacaggctatccttcccacctcgggacgctgatcgggcagggaactctgcgggctggtatcgtgggctttcaagatcgccccttaacgccctctgaaatggagcaaatgaagttcctcctcgatgatcagctgaaccaaggtgccctgggactatccctcggtctgatctatccccccggcagtttctcccccacgtcagagctgagggagctggcgcgtgtggtccaaaagcataagaagatcctcgccgtccatatgcgaaatgaggggccgaatatcttccaggcagtggaagagatgctctctattgcggaggaaaccggtgttcatctgcatatctcccatttgaagctaatggggaaagcccagtgggggcaggccccccgcttacttgagcgcatcgaagcgtccaggcaacgtggagccgttgtcacctgtgaccagtacccttataccgcaacctccactattctggccgcactgctccccaggcgggcctatgacggaggttctgccgccatgctgcgcagggtgtcggacccagacacatcccttcttcgggacatcgcagaagagatggagcggcgcggcggcgcggacgctgttttagtcgcctccacccacggaagcgcgccggaatatcacggaaaaaccgtctcccagctctctgtttgcctgggacttaccccagccgaaactgttgcccatattttggcgcgttgttccggaactgtgtctgccatctatttttccatgtcccaagaggacgtccataccatcatgtgcgacatgcatgtcgccattggcagtgatggctccgccttctctcttcaggatacacagggcctgcccagccctcaccctcgcaacattgcaacctttccccgttttctgcagaccgtgcgggagcacagactgatgtctcttcaggatgctgtctacaagatgaccgcccttcctgcagccattttggggcttcgtgacaggggaaccctggagccaggcaaggctgctgacatcactgtgttcgattatgagtccgtctgtgaccaatgtactttcaccaattccctggtcgccccgtccggcattgagcatgtcctggtaagcggcgtgttttccctgaagtctggttccataaccggagcccgccccggtcaagtgttgctgcggtaaattgtgatcacctgcacataagcaaacgagaacagaaaggagaatttcttgtggaacttggtaattgggctttgatctcttccccttctctcctggcgctgctcccgctgatcatcttcattgtgtttgctcttcttggaaagggcaattatctgggcatgttcctgggcatcatcgtcggcttcttcctgactggtcaggacctggtttccctgaccaatgcctataccgctgcgatctcctcctccaccacagtgatcggtctgctcatcatgttcggaacagggctcggcgttctcatgacggaggcacgtatcacccacactcttgtctattggatcgtcaaacggatcggcatcaacactcgtgccaaaggaaaaatcgtcctgatcctctcttccatcttggtctgcgggctgctggggactctggccggcggaaacgccatcatctctcccatcctgatcccgattttggctgctctgggcatcacccccactgtggtggctgtcctattcaaggtatctggcgaaatcggcctgattgttggcccgctgactggtgtcaccctgatcaccatgcaggtaaccggcctctcctatgggcagctgatgctgtatgccgtgatccccttttctctcttctggctgaccggggcctggatcggatgcaaccgcgcccagcggcttaccgaaggcactgagcattatgagctttcttccgatatctccagcattgactctatcactccaaccccaaaggaaaaaagaaatacaattattttcttgatctcctttgtcgtcctgatcacctacggcatcctgatgaagcagagtacttcctatgcgctgactgtcatgctacttttggctggaattattattctgattgccggttttccggtagatgaaggtgtcaaaatgctgagcaaaggcatcggtagtcaggcctccacgttggtcctgcttttgaatttcaccgttatgatggacttggtcaacgccggcgagggctttaccgctttgggcaatcttctcagcgggctggcgcagagtggtggagccaccgctctcgctttggtttccgccgtggtgggcggatttggaattgagaccgccgctgtactggaaattcagatcgtggctgagatgttcggtgagatggcaattaaggcaggacttcctatgggtgtttttgctgtctctatcctcgcggcaacccgcctgaccagttctgtctatcccaccagcaattttatcggtcagatgatcaccgcccgttgcgacaacacgaaggaagctcttcgtgcaaactggattggtgccgcttttgcatgggctttcgttttactttatgctttcatcggtccaatgatcttttaaaacagtttgcctctcatatccccagctgcggagctatgctccgcagcatttttaatgccaacatctcctcttctttttgaaagggtcattttttcaggtcttcttttcctgcgcagtgtaacatccccgcagtcgatcaaaagctgcccccgccaggagccaagaaagtcactcccccgaaatacgattctcctgtgctctgggcatcacagttcctccctcatatctctcttcccacgtctgccctctccaccgcgtttccaaccaaactgtgccgcaaacagttgtgtcttcatctgagtgtgatgcagctgcgtcctgtattgtgcataatccttttgataggtggaagggaatatttatagaggtcagccggatctatgagatcctgttcctttgggatctggacgcgcctacatatttaagccccactgccgacggcatatacctttcccgttcatagtaaaacatggtacaggcttccatcacacatggatctcccccggagctctccccctcggaaaaaggcaagctgtccacagtgggaaagacaagacaggagcgccccgccggggcgctcctgtcttgtctctattgggggcggtcaggactgggtgtttccggcctccacaggttcgggctgctgctttttgcggcggccctttttggtgccgtccaggttctcccgccggatcagcagatagaaggcgggcatcaggaacatggccaggagggtggaggcgataaggccgcccaccatgacgtaggccatgtccttcatcatgctcatgccgctgtcattggaaaaaatcataggcaccatggagatgatggtggtcagggtggtcatcaggatcgggcgcaggcgggtggtgcccgcctccaccagtgcatcccctagaggcatggtctgccgcagctggttggtgccgtccaccagatagatgccgttgttcaccgcgatgcccaccagcatcaggaagcccatcaggcccacgatgctcatgggccgcccgttgaggaacaccaggccgatggagccaataaggctcagcggaatacacatcatcaccatgatggacagccggggggagtcgaactggatggccatgaccaggaacaccaggaagatgcccgcggcgatggcggtcgccatgctctccaggccctctgcggtgctctcatccatcatgcccacgccgaaggacaccccctggggcaggtcgagctgggccgtccgggcgtcgatctcttttggggcgctgtacttggcggaatcggtggtggtggccgtaagggtgacgctgtactgcccctcctgccgggtgatgatgggcagagtagtgatgtactctacggtggagatgtcccgcagggccacctgctggccagtctgggtggtgatggggtagtccagcagggcggagatatcgtcgtacttgccctcggggtactccaggaccacatcatactccgtgtcgccgtagtccaccgatgtggcattcatgccctccagcaaatagtagatctgcatggccaccgctgactcagaggtgcccagggccatggccttctgggaattgatgacgatgcggcccttggactggctggagcggaaggggttctcgatgcggataacgccggggacctgtgtcatggcctcctccacctgctccgctgcggtctgaagggtatccaggtcgctgcccagcaggaccacgtccttgctgttgctgctcatcagggcgctcatgtccatggcgccgctgggggagacagacacatccatatccggcacgctgccgaagcgggcggtgtactcctccaccgccgcctcgctggagcggtcacagttatctacggagtaggcggtgaaggaggcggtattcccggacaggtccagggtcacgctctcgaagttctcgtcggagaggagggcgtcctccagggtctgaatgcgctggttcatcacctccaccttggtgcccgagcggaaagctacgtccacagtgatgctgccgtcatagttgctggccatcatcacaaattccatctgggtcatcagcaggatggcggccaggaagcaggcgccgcccaccagcaccacccgcccggggtggcgcagcagccggggcagggtccggcggtagaagcccttgaaccggcccaggatgcggttggtaataagctgatccttggtccggggcttgagccagaggaaggccagtgggaccaccaccacagcgcacaggaaggagcacagcagggtcagcaggatggtccagctcagggggccggtcatcatgcccaccaggccgtcggccatggccatggggatgtacaccaccacggtggtgagggtgcccgccaggatggacatgagcatggtggccgtgccggtggcggcagcctcccggaaatccattccctcttccttgcagcgcatgcagctctccagcaccacaatggagttatccacgatcatgccgatggcgatgatgagggccgagccggtcatcaggtcgatgttgaagccggcaaagttcagcaggatcactgccagcaggatggacagaggcatgctgatgcccacgatcaggctggcccgcaggtcgccgaagaagacgaacagcacgatcatggttaggatgacgccggtgatgagggtattgagcacctcgcccagggtctccaggatactgtcgccctcgctgtaaatggtctcaaagcccacaccgtccacgctgtactggtccagcacgtcctggaccgcattgcacacctccatagtggcggcggaatcctgcttggtgacagtgagcatgacgctctcctggccgttgtagcggctgacggtgtccgcatcctcctcatacaggttgaagaaggtacagatatcctccagcatcaccgtgcggccggaaggggtctggatgggcagatcccggaagttggggttgacctccacgttgccgtacacgcccagggcgatgtcctgggagcccagggacacgctgcccaccggcatgtcgaagtcggccgccgcgatggcagagcccacggtggaaatggacagtccatactgccgcatggccgcctcgtccagcacgatgcgcaggtactcatcccgggcgccggacagctctacccgggccacgccgccgatattctccagggcggggaccacctcgttgtccagatagtccgccacgtcgatgcccgcgggggcggtggcggagatcatcatggttcccagggcgtcggcgctgatctccatgatgatggggtcgccgcactcgtcagggagggagggcatcaggttatcgatggcgctcttcagatcagagtaggcgtcgtccatgtccgtgccgtattgataggtcagctggagcatggtgtagttttccgaggagtaggagttgatggaatccagatcggacagggactcacactcgtcctccattggctgggtcagcagccggtctacgctgtccgcatctgcccccggccaggtgatcatcaccagctccatgggcatctccatgtccggcatatactccaggggcatcccggtgagggaagcggagccgaacaccaccacgcccaggatgagggtgatgatagacatggggcgccgcaggactaattgaatgaacttcatgccgcgttatccctccgcctctgggccggatgccgccggatcggcctgggcgctctcgctgtcctccgcctgggcggcggtctgcacggagaccccgtcccgcaggctggaggaccaagtggtgatgacctcgtcccccagggtcaagccgctggttacggcgatggtgtcagcggtgtacaggccgatggtcacgtcggagcgcaccgctttgccgtcctggaccacatacacataggagacgccgctttcaaaaaacatagcgtcgctggggatgagcactgccccggtgacctggtgggcggtggtagtcagctccaccgccagcccgtcgggcaggtcctgggctccgtcgataatagcctttaccctgaactggcccacttgggcgtccaccacgccgccgatctcggtgaccgccccctcataggactggccgttataggtgacggtgaccgcctggccaggagtaagggtctggcgcacagagtcggtgacatagaaggtgaccgttttgttgttcccattggagatgacgaaggccacctgaccggaagcggcgaagttgttctgggtgacgttcaccgcctccaccacgccgttgatgggggcggtgaggttgtagagggagagctggtactgggcggaatccacccccacctgggcggactggatgcccgcccgggcagagttcagggatgcctgggccgcctccaggccagcctgggcagacaggagggtctggtgggcctggtccacttccacctgggaggcagcgccgatctccagcagggccagagtgtcgtcatagttgtcctgggccaggcgcagctgctcctgcagcaggggcaggtccgtgccgccgtagttggacaccgcgctgttatagctctcctgggcactgttggccgcggcctgggcattttgcaggctcaggcgggcgctctcgtcatcaaagcggcacagcaggtccccggcagagacggtgtcccctacggcaacggccacttgctccacattgccggagatcatggataccacgctggcagtaccctctgcggagatggtgccgatgtatgtgctctgggtgctcaggtccccggcctggacggcggtggtctccaccgttacggtggggtccagcaggggctcctccaccggcgcctggcagccagccaaggcgagggtcagggcaccgcacaataaaacggaaagtttgcaatccatggagtcgtgttccatcctttcttcccttcaaactgcgggcagccggcaggggccgccctgagtgtctctgtttatgctccctgggccgggagcaggccgtactccaccgcccagcgatagctgttgcaggcggagaacaggtccctccaggcgctgtccagggcagattgggcagatgccacttcgtcctgggcatccagcaccgcggagcaggtggtcagccccaggtcatagcgggtctggacggtgtccagctgggactgctgccaaaccagagcggactgtgcactggcatacagctgctcatagttggccagggagtcatacaggcttttgaagctggtctcgaagttctggactgtggactggtaggtgagctgagcggcgttccaggtatgctccgcctgctggagcaggtactgcttgcgggaggagcggtagtcggagcgggcgtccttccaatcctcttccgcatcctccagcgccttctgggcactgcgcagggtccagctggccgccctggcggcctccaggccggcctcatagtcggggacctcccacactgtctccgaccgggtaggcagagcgcccagttccagctctccggtgggggcctcaccgatgagattctggagctggaccttcagctcccggatggtggcgtccaggctgttcagctggctgacggtctccacccgggtctgctccagctgagccaccgtctgctgggacacctggcccagcgtctgccgcaggcgcagctcctccaagctccggtccagggcggccaggccccgctgtccgtcggcggcctgctgctccaggcccagaagggtgatgtacagcgtctcgcccccggagaccacctggttcaccgtgtcctccagctgccacaccacatcggcgttgtccgcctgcagctctccgtccttgatcgcgtcaaaggtctcccgcagagcgtcataggtctggtccagggcgtcagcacccatgctgttgcccatcaggaccatcatccactgcagatcggcgatgtcgttgatctgtcggcgcaaatcatcatacatcaggtcatagtcgatgccctcgatgccgccgatgttctccgccaggatcagggcgctcaggctcccctcccggatgcggctgtccaggttggcccaggtcactgtcccctccgggtcgggccggggattctgggtctcctccgggtcgggccggggattctgggtctcctccgggtcagcaggggcctgctggactcccccattctgggccccggtctcccgtgcgttgtcctcccccggctctgcggccagggtgggaaggctcagcgtaccggctagaatcaatacagccagcagcagagaaattctttgtctcatggttgtgcctccatcgtcgctgcgcgttcgtgcagattttctaacggcggtagcatagcacgctcaggtaaactcattgtaaactgggccgcccgggcggcaggaagaaaacgccggaaatccccctctctgccccacattttttagaaaaacccacaaagagcgacaggaagtttacgtctagtttacccgaaggggctatgctggtcttccagaggcgggctctccctttgacggacagcccctgggacgatataatgtctgtgacaccctatatcccatggatgagatactaggctgttgttctttcgttgatttttgttgtggaactatcaaaaataactccggcgcgggagaactgcccagaggggtcttcccaaaccaaggccggggaagggagacggcaatggcgaccattctgctggtggaagacgatacctctatgcgcctgctcaccaccgccaagctgaagcaccggtatgccatcatcagcgtccaggatggggtggaggccctggacgtgctggaacggcagccagtggacttaatcattgctgacgtgatgatgcctcgaatggacggctatacgctggtaaagaccctgcgggagcggggggaccagatcccggtcctcctgctcaccgccaagcagtctttcgaggacaagcgtgagggattttcctccggcgtggacgattatatgaccaagccggtgaactacgaggagctgatctggcggctggatgcgttgctgcgccgggcgcacatcgccagcgagcatcggatcgtggtggggcggacagtgctggactcagggacatacaccgtcacccgggagggggcggctatggagctgcccaaaaaggagttcgagctgctctataagcttctgtcttatccgggacagatcttcacccgaaaccagctgctggacggggtctggggctatgactcggagagtggggaggataccgtgaagacccacatcagccgcctgcgcaacaagctgcgggacattcccgagtttcgcatcgtcactatcaagggcctgggatataaggcggagatcacaaaggaggagcagccatgaaaaagcgacgtccgtggcggaaccgcacgctggccttctggctgtccatcgagtccgttgtggtcacactggtgacagtggccccctttgcgatgctccacattctggaccggttccactggctccgggcatccacggtctcggtgctcggaattctcgcggtgatggggctggtggtggggatcaccgccacgctgttcagccgccaattcaaccgaatggtgtccggcctgacccggggcttaaaggcagtggcagacggggatttttcccagtatctggagccggaggagggcggccccctccagcctgcctatgaggatttcaacaagatgtccaaagagctgcagagcatccagaccctgcgctccgacttcatcaaccacttctcccacgaattcaagacccctatcaccgctatcaaaggctttgcggagctcctgcgggagccggacaccaccccggaggagcgtgaacagtacctccagatcattctggatgagtcctcccacctggccgacctggccaacagcaccctgctcctcacccggctggagtcccagcagtttattgctgagaagcgcccctaccccctggacgaacagatcaagcggtgcgccatcctcctctccccctcctgggagaaaaagcagatctcctttaccgccagcctggagccggcggagttcgtaggcaacgaggagctgatgcgccatgtgtggatcaacctgttcgataacgccgtaaaatacaccccggaagggggcgagatcactgtgacactccaggtccgcccggaggagctggagatctcggtcgctgatacgggcatcggcatgccggaggaggtccgctcccatgtctttgataaatactaccaaggcagccgctccagcggcagcgggagaggcctggggctggggctgt

SEQ ID NO: 13511 - DNA, 597 bp, Unknown
  gut microbiota DNA sequence
ctcctccgtcacctcgtccagcccggtgtagagatcctgtccgctgtaggacaggaaggagctgatcttctggtcgtagaccacgcccaccaggggcacaccctgaccggcggagaagaccagggcgtggagccgcatggagaccaccgcctgcatccgggcgaacagaccgatggtgtggtcggagcggccggtctggggaagaatgtagtggggggccttcatgtgctgggcggccaactgggccgcccccacgtccagacgccgctcgatgggcagaaagacaggggtgaggccgtacgtctcataggcgtagtctgccgcggcgccgaagacggcggccttggcctcaaaccccggccagggccgcagggcgaagccgatgtagcggccgtgggggtcaatcccctgactctccagaatgccgtccaccacttgggctggtgcggcggggaggatcaccgtgggatcggcggagaggatgacctgtggcctcgtcacccccatgtcctccagttcctcggcggagtgtgtgtcccgtagggtgatggcgtccacgctcctctggagcacgcgggaggccctgcggcggttggc

SEQ ID NO: 13512 - DNA, 140789 bp, Unknown
  gut microbiota DNA sequence
tatggcccccgatggtggtgatatgtgttttgttccgggaagcccagctgttggaagctgagtcaaagtagagcgccccggcggcctcctccaccacggcgccgtccatcgccagcttggcggcgatgatgctgccctcgttgggggtgcgcttggccaggctgccggacccgtaggtggggaactggttcttctgggccagcactccttcgatggtattggggaagatcgggctcttgacccggttcaggactacgttggccacagcgatcttaccatccaggctctggttcccgctctccgcgtagaccacgcgggacagccagaacaggtcgtcctggttgtagaatgagtcgccggaagcgatgccgccgctccccgtggtgatggaggtggtcccgtctgccgggtcccagctcagcttggcatcaaaggccttgaccagctccttcagcgggacgactacccgcccggcctccatgcggacgccctcggggacatagagatagcggccgttggccaccagatactgctggcccaccttggccgtcaggtccagaacggcgctctggaccgcagcggtgctggagcccccatcccaggtgatggtcacactggggtccagggtctgagccatggcggccagcgccacataggtggtcccctgctccacagtctttcccgtgtccgcggggacgggctggccgttcaccagcagggtgtggtccagggccacagcgggctcggccgtgaccgaggtctgggtcccgtcggaattgatcgcctccaaatatatctcgtcagcggagatctcttctgtatcctgcgcttcgataccggtctggattccggtctcaagcacctgcgccgatccgtcggcggaggcgctctcctcctcgatcacaatggccgcggcggcggagtcctgctccacaccggcgcccatcaggaggagcaaggcaaatgcgcacagcagtgttgaaaacagcttgcgtttcattgtcttcactccctattacaatttgtgtcgaaacggtgacaccaaaagcaacgtttttgttacttttgttaccacattgtaaccaattcctcaaacaggcgcaagggcaaaattgactagagttctctctgaaatcttgtgcattttttcggaatattcctagtataagccttagaatgaccggttaagccctctttccccctcctttgacgcatttttacatccgcgctcttctgcctttctgcccattactcgctgtcttcccacccgccaggcacgtccatctttggccttttcctctgataattccttgacatccccttttttccgggtacaattgagaaaaaaggaggcgttcttatggcctattcgctgttcgagactgcggagctgggcccgctcatatccaaaaacaggaccgtgcgttccgccaccaacgagcacctctccgatcccagtggacagatcactcccgcctgggtggactccctggaggcgctggcccggggtggagtgggcatcatcatcacgggccacctgtcggtggaccgggaccagcgggcagatgaggggcaggcggtgctggatcaggagacggaccccgccctcctctctctggccgcccagcgggtccaccagcacggggccctgctcattgcccagatcagccacagcggcgggaaggcgcgccccggcgtcaacgggcggccgcccctctcccccggcgatctcacgccccagctgctggacaggctggtggaacagttccgccatgcggcccggacggcccagatggcgggctttgatggggtccaggtccactgtgcccacaattatctgctctccagcttcctgaacctccggtggaaccaccgggaggatgcctatggcggcagcctggagaatcggttccggttgatccgccgggtcctgctggctatccgggacgcctgtggtccccgctttgccctcctggtcaaggtggacaacgacagctgtgatgacctgcctgccctgctccggctcttccagtccgccggcgtggacggcatcgagctcagcggcctggacatggcccgccgggacgggcagaagacccccttcttcctggaccgcctgctggctgcctgggaaggcctcaccgtacccatcttcccggtgggaggcgtcttttcccgcgctgcggcagagaaggtgctggccgccggtgccccctttgtctccctctccagggcgctgatctgtcagcccgacttcgtggagcggatggaaaaaggccagacagagagcccctgcctggcctgcaaccactgctacaatgtgtaccgccagcgcccggtgcgctgtgtgctccataccgaagtcatcccccagctggaggcggtgttcggcccctaccccacctgactttccccgggcccgttccccggatcgggagcgggcccgctcacacttttgcccgccggtccccgcccttaaaaaagaaaacagaaaaaaatagaaaaaaggacttgactccagcggaaaagctggtataatacattttgctgtcacggtcgaccacagacagcgccatggagagatggctgagctggtcgaaggcgcacgattggaaatcgtgtaacggctaatacccgttcgagggttcgaatccctctctctccgccacgccggagcaaagtccgctttgctccggcgattttttatctttccaggcgggcgctccgccgcctcgccccacccacttcaggagggatctcttatggatctgtgcgacatccagcaaatcaaggccttgttgtcccggcacggctttcacttctccaagtccatggggcagaattttctggtggaggactgggtgccccgggatattgcggaggcatccggcgcctccccttcctgcggtgtgctggaggtgggccccggcatcggccccctcacccaggagctctcccggcgggccgggcgagtggtctctgtggagctggaccggtccctcctccccatcctgtcagagaccatggccggccgggaaaatgtggagatcgttccaggagacatcctgaagactgatctggctgccctgacagcggaaaagttccccggccttacgccgctggcctgtgccaatcttccttataatattacctcccccgccatcaccgccctgatccaggcgggggtcttcgccgccatcaccgtcatgattcagcgagaggtggccctgcgtatctgcgcccggcctgggacaccggattacggggccttctccgtcttctgccagtaccacaccgccccggagctgctcttcgaggtccccccttcctgctttatccccgcacccaaggtgacctccgccgtcctgcggatgacgccccggcccgccccggccgaggtggatgacgaggcccacttctttcgggtggtccgggccgccttcgcccagcgccgaaagaccctggccaacagcctcacctcctccctgtccggcctgtacacgaaagaggacatccaggaggctatccggatctgcggcctcgccccggatgtccgcggggaacggcttggcatcccggagttcgcagccctctcgaaggccctgcgggcccagccccaatgagcccctgcgtcctatttctgaaacatagtgtgcgccaatagagaccgggccttcccgtctgggaaggcccggtctctattgggttcacaccgcccgcatccggtggtcggtgcccaccgcagccgcggccgcgaggatggcgccccccgcccctgccatgatccaccgcagagagaccacatcggccagggggccaaagatggccatgcccaaaggcaggcacccggcgtacatggtgctgagcagtccgaacaccctgccctgcatgtccgcctccgtgtgctcctgaagcatggtggtgatcgccgtctgcaccaccgtcagcgctgtcccgtacagcgccatcagccccagataggggacaaagtgccgggacagccccatccctgccgccaggacgccaaaagccagcaggcccgccgtcagggtcctccccctgcgccggaagccgccccaggtgctcatcagcactcctcctgctatcatccccgcaaagccggccagctccaccgctgtaagataccaataggtctccccaaaggtccgccggacaaagaggcccgccagatacccccctggcacgcagaaaaaggtgaccagcccgtatagtaccagcagcctccccgccagcctgtgggagaaagcacagctcaccccggcacggatatcagccaggaggggagaccgctccctagtccctctctgtccgggcagcgccaggcaggacagcagacccgtccccacgaccgccgtcaccacatcgatcatcagggtggtgcgcagatcactcaccgcgaataccgcgcctgccgccgccggggcggcgaaattcaccagcgactgcatggcggcattgaggccgttgtaccgcatgagctggtcctccgggaccagctggggaatggccgcgttcaccgccggggcctggatgccggcccccagggaacggaggagcgacatgaccagcaggccgcccagcagggccgggcccgatgggatgtggggaagcgcagggatcatagccaaggtggcgcaggcaatcaggacatccgctccgatgatgagtgcctttctgttgtaccggtccgcccaaacaccgcctaaaaaggagaccagaaactgtggcagataggagcagacagagaaggcggccacccacccgccgctggcggtctccatagccgcgtaccagaccagggccatctgcaccagggtggagccgaacagggtgatgcactggctggtcagaaagagcagagccctttttcgccatccggagggctgtctgttatctgtcatcccgcccctcctctccccggggaaggagcaccaggcgctgggtggggtagccgaactccgtcaacagctcacgctgggcaaagcccagttccagcagcagggcccggtgccccgtgtccgccctgtcccgttcccggtaggtggtggtgctgatctcctgatcgggcagacaggtctccgtcagtacgtccagaaacagccgctggagcccccgcctccggtactgggggtgcacccccagaaactcgatgcgtcccggccccgtggagaaggccagagcccccgccaaggtgtcaccctcccccaggaccagggcgtgtccggcgcgaatgctctcccgcagctgctccagatacgccccctcgtccatggcgggatagccgtcgatcaccagacgcatcagctccatccaggcagggatatctctctcttctgccagccggatctcctcctttctgaacgcttccctgcccctctccatacggagggtaaagggcagctggaggggatagaagttcccagccgcccggtaagccgcaggaggcgccttgtacatgctcttaaacgcctgggagaaggactgctggctctcgtatccgcactgcagagcgatctggctgatgggccgtcgggaaaaagccagcagcttggccgcctcagtgagccggcggcgctgcacatagtcatgaagcgtcattcccaccgtctctgtgaacatgcggtgcaggtggtatttggagtagtggaccgcctccgccaccgtctccagttccagcctgccgcccaggcggctctcgatatacctgatgacggtctgtatcccacggaccgctctgtcttccattgaagcccctcctctctggatggtatgataacagatttcatggaaaatggcttcctcattcttgcggttttaaaattttcctccaaaatgtaagggtgcagcctgacttgttttggccctgatgagctcctgaaaaacttgcccttgccattcttcggaaaatggagtataatattttcacgaaattttccaagaaattttgttgaaaataggaggattgccccatggaaacttatggactggaacagctgggcattatcagccccagcgctgtgtatcggaacctctcccctgccattctggtggagaaggcgctggcccggggcgagggcaagctgaattccacgggcgccctgtgcgtcaacaccgggaaatataccggacgctctcccaacgacaagttcatcgtggactccgccggtgtccacgacgagatcgcctggggcaaggtcaacgtccccaccacccaggaggtctttgacgccttgtatgagaaaatggtggcctatctccagaaccgggagatctttatctttgacggctttgccggtgcggaccccaaatacaccaaagctttccgggtgatcaacgagctggccagccagaaccttttcatccaccagcttctgctgcgtcccacggaagaggcgcttgccaattacaagcctgacttcaccatcatctgcgcccccggctttaagtgcatccctgagcgggaccatgtgaactcggaggccgccatcatgatcgactatgagaagaagatggtgctcatcgcaggcagccagtacgccggtgagatcaagaagtctgtcttctccgtcatgaactacctcatgcccaaggagggcgtcttccccatgcactgctccgccaacatcggtgaggccggggactccgccatcttcttcggcctgtccggcaccggcaagaccaccctgtccgccgatcccaaccgcaagctcattggcgatgacgagcacggctgggcggatgactctgtctttaatttcgagggcggctgctacgccaagtgcattgacctgaccgaggagcgggagcccgagatcttccgggccatcaagttcggcgccttggtggagaacgtcatcatggacgaggagacccgcgtccccgactactccgacggcagcctgactgagaacacccgcgtgggctaccccgtggactatatccccaatgccgccatccccggcatcggcggcacccccaaaacggtgatcttcctcaccgccgacgcctacggcgtcatgccccccatctccaagctgaacgagaagcaggccatgtactactttgtctccggcttcaccagcaagctggcgggcaccgagcggggcatcacctcccccgtgcccaccttctccacctgcttcggcgccccgttcatgcctctggacccctccgtctatgccgggatgctggctgagaaggtggccaagtccggcgccaacgtctatctggtcaacaccggctggtgcggcaacagcggcaagcgcatgaatctgaagtacacccgcgctatggtcaccgccgccctcaacggcgagctggaaaaagcggagttcgtcaccgacccctacttcggcgttcaagtgcctacctcctgccccggtgtgcccgacgagcagatgatccccgccaagcagtggggggacgacaccgccggttacgaggccaaggccaaggagctggccaagtcctttgtggagaacttcaagaagtacacccatatgcctgccgatgtggtggcagccggccccaaggccgagtaaagctggcagaactctatggggcgccgcatctgcggcgccccatttctatgaggaggtggacccatgaagcgatatcagatgtcagaatccctgccggtgggcctcctgctggcactggcgggcgggatcttggattcctatacctatttgaaccggggacaggtattcgccaccgctgagaccgggaacctggtcctgctgggcatccatttggcccagggagagctgggccgggtcctctcctgcctctttcccattctcgcctttgccctgggcgtcctgactaccgaggggcttcgccgccgcctgagctccggccgggtccactggaggcagcccatcctggcggcggagtgcctggtcatcctggtggtctccttcctgcctcagggagatctggacgccctggccaatgtgctcatcgcctttaccagcgccatccagatcgagagtttccgaaaatttgcaggctgcggatgcgccaccaccatgtgcaccggcaacctgaggagcggcaccgagcacctgttccgctggctccaccaccgtgaggggacctctggccgcagcgctctggtctattacgggctgatcctctccttcgtcgccggcgcggtcctcagcggactgctcacccccctctttgggacgcggacggtcctgaccgcctgcctgcccctcctgctctctctggcgctgatgttccggctgccggaccccacatagccaaatgggaaagtaggccgcaccccgcagggggcgcggcccactccattactctgccgccggaacgtgggacaacactgcgtcccgcaggaagcgggcgcagccgggaacgcttttgtcataataggccgtaaagcgttcatcctgtacatacagctccgccagtcctcggtgcctggccggatcgtaggggctgctgccaaaggacagccacgcccggtgcagctccgccagcgctcggccggcctcccctgccgggtccgcgccggagcggacggcctcctccagcttcctctggatggcttcaccggtgtccttccagctctgataccgctcaggagtcaggtccaaaatgtcccggctggcccgctccgcctcctcgtctccgtacttctcccggatctccgccccgtagcgcgcctcgttttcctccacggcgcgccgcttgaacgcctcaaactttgcctcgtcgctcataaactcattcctttcttctgacaggattgtccgctttacagtatggatcaattcctggatacgcccctcttccttttccaaggcggccagatggccccggagcgcgtccagccggtcaaaggatggatcatccagaatggctccgatccgggccagctccaccccgagggcccggtaaaacaggatctgctggagccggtctacctccgccccgccgtaatatcggtatccattctcgccgatgcggctgggcgtgagcagaccgatccggtggtaccagcgcagggtgcgggtggtcaccccggccagttccgccagcttctgaatggtgtattccataggcgtccctcctttgactgagtccattctacccgtttacgctgcgtcaatgtcaagtctgttttttcattttttctgcggtcacgccctgtggcctttttccccggttttcggcaaggctgcgggcgcgaaccctgtccacaactgcagtgccctctgccttggcagagggcactggtcttttataacttagccgctttactggtcctgtccttcctttctgctctccttccgttttttacgcagtatgctccgcccgatcaccacgccggccgccgcgatcacggccagcacgaccaggccgaacacatggtaggagatccagatcagcatgccctggaagccatccaccagcccctccaggctggcggagaagccggccgccattttggctcccagcgaggaggtctctcccggctcctccgtaaccttcgtcacctcctgaagggtcagatcgatggtggagaagctcacaaggctgtcatactgattcatggtggagctgtactgttcgatctcatactccacgtcgctcagggcgctctccagggagatgatgtcctccatcacctctgcttccgccagaagggcctggagccgctcctgcttggtgcgcagggtcttcagacgggcctcggtgtcatagtactgggtgctgatgttctctgtgctctctgtcttactggccaggtagcccagctcccctgcatcctgcaaaaagccggtgtaggcatcctccggcacacggatgacataggagccataccggtttgcgttcacgttccgatagctcccgccctccaccgcggcgctctcgaaatagccccccgcctgattcaccatctcgttcagctgctgagccgcctggtcgaactcggtggtctccacatacagctccgcccggcggaccagcttggcgtccgggtcctggtagaccgggctctcctgaggggactggcttgggctctccacctcatagatcccgccaaattccgcggtctccccgccggcagcccccggcgtgctggaggcagtctgatccgccggcgccccattcccgccgccgcttccgcaggcgggcagcagcaggaccagggccagcatcaggggaaaaagcgcgcgtttcatggttcgcttcatggtatcgctcctccttttcatcgtttccgcaaggcaaagatcaggtctctctgtccgattagacgcctccgcctggaaaaagttccgcacctccgccccctttttttcatagaatgggaaaaaatcgggaggtaatcgtatgcctatcatctatctctccccctccacacaggagtggaactactacgtcaacggcgggaccgaggaggaatacatgaatctcctggcggacaagatggtcccctatctggacgcctccggcatccggtatgaccggaacacccccagtatgacggcggccgactccatcgccgcctccaacgcgggaaactttgacctccacctggccctccactccaacgccgcccctgagggacagtacggcacttccagaggttccattgctttctattaccccggcagcatccagggcaagtgggccgccgacatcatcgccaacaatctgcgctccatctaccccctgccggacaaggtccgggcggtatccaccacaacgctgggcgaagtgcggaaggtccgggcccctgccgtcctcctggagctggccttccacgacaacccggacgacgccgcctggatcaaaaacaacctggatgagatcgcccgcaacctggtcctctcggtcactgagttcttcggactgcccttcctgactccgatccccgcccgctccggcatggtggacgtgaactggggctccctcaatatccgcagccgcccctccctggacgcccccgttctggcccaggccccggacggtgcgctcctcaccatcatcaaccaatggcaggactggtatctggtcaactataacggcaccattggctacgccaaagacagcttcgtgacgctgaactgatgcaaggaggtttctatggatatccatgttgtcaaaccgggcgataccctgtactccatcgccctttcccacggcgtgcccatgtcccgtctgctggaggacaatcaactccctgacccctcccggctggtggtgggacagaccatcgtaatccagtacccggagcgcacctatgtggtccgctccggcgatacgctcttctccatcgctcaggccaacggcctgactgtcaagaccctgctccgcaacaacccctctctggcgggggaggaccgcatctttccagggcaggagctggtcctcgcctaccgccaggagaaacaggggaccctcaccgtcaacggatacgcctacccccacatcgaccgcgccctgctccagcgcaccctcccctatctcagcggcctgctccccttctcctacgaggccaccgccctgggggagctcaccccgctggacgacgtggccctggtggatgcggccaaacagatgggggtggtccccatcatgaacatcaccaacctgacaccggacggcatgttctcgccggaactggcccatatcatcctctccgatcccgccatccaggagaaactggccgccaacgtgatggaggtcatccgtgcccgcagctatcaggggctggacgtggactttgaatccatctacgccgaggatgcccagtcttatgtgtccttcatctcccgcctgcgggagcttgccgcgcccatgggcatcccggtccttgtggctgtagcccccaagtcctacgccaaccagccgggtctgctctatgaggggatggactacgccgggctgggccgggctgccgatttgatattcctcatgacctatgagtggggctactcctacggtccccctatggccatctcccccatccgcagcatgcgcaccgtgatcgagtacgccctgaaggagatcccagcagagaagctcctgctgggcatcccgaattatggctatgactggcagatcccctactcccagtccagaaaggcggtctccatctccaaccagtacgccgtctccctggccgcccgctactatgctgccatccggttcgacgagtcggtccaggccccctggttccggtacgtggacgagcggggacaggagcacgaggtctggttcgaggatgcccgcagcatcagggccaagctgagtctggtcccggaatacggcctgcgtggggtggggtactggaacctgatgcgtcccttcccccagaactgggtgatcctcaacgccctgtatcacattcgggaagggctgtaacatttttctctccgccgctggatttttgtcctcctttgtagtaaaatgaggtatcatttgtgcaaaggaggacattttcatgtctgttgaaattggcctgaagggccgcgcggaggagacggtgaccgacgcgaataccgctcaggccgcctgctctggcgctctgcccgtctacggtacgccctttatgaccgctctgatggaaaaggcggcctggacctccatcgccccccgcctggcgccgggcgaaagcacggtgggcactgccatgaacatcacccacatctccgcctcccccgtaggcatccgggtctgggcggagagcgaggtcaccctggtggacggcaagcgcatcgagctgaaggtggccgcctatgaccagacgggcaagatcggtgagggcacccaccagcgctttatcgtcacggatgaccgctttctggccaaggcggcccggaaactggagggctgagcggcatgtccattgaaaaagtccggcaatatttccagcctttaggccgtgagcaggatatcctggaatttgagacctccagcgccacggtggagctggccgcccaagccgccggcgtcatccccgcccggatcgccaagaccctctccttcctggtggacgagggctgtgtgctgattgtgaccgcaggggacgccaagatcgacaattccaagttcaaagccatgttccacaccaaggcaaagatgctcagtcctgagcaggtatattcctttacaggccatgcagtgggcggcgtctgcccttttgccaacccggacggggtgcgtacctacctggatgtgtccctccagcgcttcgagactgtcttccccgcagcgggcagcagcaactccgcgatccagctcacctgtgacgagctggcggagtactcccacagcctgggatggatcgacgtgtgcaagggctggcaagagaccccctgaccctgttttcccatcagaaaggagcgccctgtttccatggagacaaaagactgtatcctgacccgccgcagcgtgcggaaatttacagaccggaaggtggagcaccggcttgtggagcagatcatctcgctggccgcctatgccccctcctggaagaacacccagatcagccggtatattgccattgaggaccccaaggtcctggaggagatctgccgcacttacgcccccttcaacgcccggatcatcggcaactgccccctgctcattgcccagacctttgtgaaaggccgctccggcttcgagcgggacggttccttctccactgaccgggaggcgggctggcagtactacgactgcggcattgcctgccagaccctatgcctggccgcccacgacctggggctgggcaccgtggtcatgggcgtctttgaccggaaaggcctggaggcgtatctccagattccggaggatcaggagctgatggccctgatcgccctcggctatcccgatgagtcccccgccgctcccaggcgcaaggagacctccctccttctcagctatcgatgaacaaaatggaaaagaggacctgtctgtgagacaggtcctctctttctctgttcagcggcgcgctcaattccgggacttgcccaaaaagcgcagcaggtacaaaaacaggttgatgaaatccaggtacaactgaagggcggagaaaatagacgccttctccagcatgtcggggtagcccgcatagtagttgtagtaggctttgatcttctgggtatcataggcagtatagcccaggaagatggcgatgcccgccaggcagaagatccggtccagggcggtaaagccggggataaacaggctgaccagcgcgaatacgaacaggaacaccagtccagtgaaaaggatggggcgcagccgggtcaggtctgccttggtaaaatagccgtaggcagccagcaccgcgaaataagccgcagtggccaggaatacgaaaatcaggctcccaaactcaaagatatacaggtacatggacatggtgaagccgaacagcgcggaaaaggcgataaagatccctctggctgtccccactgacatcttttcaatgcgggagaccatcgtgatggacagtacgatggtggcgatcagtacgatcagatggatataaggcacataggccagggcgtagagtgtggcattggtgacccagcccagcagggcgatcccgaaggtgactagaagccccagcaccatccataaaaatgtcttggccgtatattgcccgatgctctccatccggctggactgcccatagtcccggtcaaactcataggggtcaaagctcataaaaacagctcctttcttcctgatcggtcaggtgttgtgatcggcaacatgaaactgcttcagattcccgatcttgtgactgcggcggtccagctcctccagcacagcttccagagggatgttctgctgggccatcatcacggtgagatggtagatcaggtctgagatctcccccaccgtctcctcctgccgcccattcttggcggcgatgatggtctctgcacattcctctcccacttttttcaggatcttatccagccccttgtcaaagaggtagcaggtataagacccctcctgggggctggccttccggtcctggaccacctgatacaactgcttccatacgtcgttcacagacattctcctatccgctccccaaaacggggagtcaactccccagcggaactatgggtatcataacataatctcctgaaaaaagcaactgtctcgtcctgtgtgacaggtagggccgtcgggcaggcaaaagtagagcagggtgtcggtatcgcagtcggtaaagatctgctccacatggaggaagtggccggaggtctcccccttgttccatagtttgccccggctccggctccaaaaccaggcagtctttgtctggagcgtccgctccactgcctcccgattcgtaaagcccagcatcagcacgtccttggtccgggcatgctggatgatcactgggatcagctctgatttttgaaacagctggtccaaatcaaacatatctatcctcatttctcccagggtggtttttttacctggtactcccacgggtcctttccaggctgaaaagcggacttctgctgcctccggccgccgtccgggacagacggctggccctctggcttgccctgctcccccttctttcgggagaacagcagctctccgcccacgtccagcaccagctccagcagatcgtccagcatggcatccgctcctctcagcgcaccgggatcttccgcttccgcagatactccttcacctggggcactgtcagctccccgaagtggaacagggaggcggccagagccgcatcacagtctgtctctgcgaagacctgggcaaagtgctccaggctgccgcaacctccggaggcgatgacagggatggagaccgcctgggtcacggcccgggtcatctccagatcaaagcccgccttggtgccgtctgcgtccatggaggtgagcaggatctcccccgctcccagcgcctcgcccctccgggcccactctacggcgtccaggccggtgggggtgcgccctccggccaccaccacctcatagctgccctccggccgccgccgggcatcgatggccagcaccacgcactgggagccgaatcgctccgccgcccgggagatcagccccgggtccttcaccgcggcggaattcacggagatcttgtccgcacccgcccggaggagctgccggaagtcctccagggtgcggatgccgccgcccacggtcagggggacgaacacctgctccgcagtccgctccaccacgtccgccactgtggcccggccgtcgctggtagcggtgatgtccagaaagacgatctcgtccgccccctggtccgagtagaaccgggccagctccaccgggtccccggcgtcccggatattcacaaagttgactcccttgaccacacgcccgtcccggacgtccagacaggggatgatgcgctttgccagcatacgatcacctcaatcctgacggccggcgtcccgcactgcctgggccagatccaccgtccccgcgtagtacgcctttcccacgatggccccgtacagccccatgcgggccagacggcggatatcctcattggacgatacgccgccggaggccacaatattcccggtgtacacctgtttcagggcctccagccgggcaaaggagggaccggagagggcgccgtccgtctcaatatctgtaaagataatattctttactccaacttccatcataaactttgcaaactccaagtagtccaatccagagtcctccacccagcccgcggtcctgactctgccgtcctgggtgtcgatccccaccgcgacgcgctccccatagcgctccgccgcagcgcggacaaaatcagggtcgctcaccgcagccgagccaataacggcccgccccaccccggcctggaacaccgcctccaagtcctccatgcaccggatgccgccccccagctccacctggagaccggagcgggcggtgacctccgccacgatcccgccgttgattcgggtgcctcccctggctccgtccaggtccaccatatggatccagcgggcaccggcctcggaaaaggcacgggcggtctccagtgggtcctgggccacctggtggaccttgttgaaatcccccttgtaaaggcgaactacttttccgtcttttaagtcaatggcgggcagaatatacatggctctgtcgctccctttctgttcagatcctgccggtcctcagcagttcagccctgcgaaattgcgcaggatggtcagccccacctcgccgctcttctccgggtggaactgggtcccgtaaaagttcccgctggacaccgccgctgtcactgccggcccgtaatcggtggcagcgatcacctgggcgggatcggtgtcttgggcgctgaaggagtggacgaagtagacatacgccccctcgtccagcccccggaacaggggcgagtggtgaaaaaaccgcaggctgttccatccaatgtggggcagcttgctttgggtgggtatccggtccactgtgccgcggatcacccccagaccgggacaggggcgcacctcccgcccctgctccagcagcagctgcatccccaggcagatgcccagcaccggcttcttctgaccctgggccagcacatgctggtccagccctccgctccgcagccggtccgccgcgtccgggaaggcccccactccaggcaggataatggcgtcagcccgttccagctccgccgggtcggcggtgatgcagctgctgcagccgagatagctcagggcgttggccacactcttcagattgcccaccccgtagtccacgatggcaactgtgcccatcacagcacccccttggtggaagtgacgccggtaccggtgatttgaacggcctccttcaccgccgctcccagggacttgaagagggcctctgtgatgtggtgggcattttttccataaaggcacttcatatgcagagtgaggccgctgttcactgcaagggcccgcagaaactcttcggtgaggcagggatcataagtcccgatcataggctgaggcatatcagcgtcaaagaccaggaagggccggttagaaaagtccagaaccgtgaagcacagggcctcgtccattgggatacaggcggaggcgaagcggcggagccccttccgatcccccagggcccggttcagagcctggccaaggacgatgcccgtgtcctccaccgtgtggtggccgtctacctccagatctccctcggcctctattttcagccccagtccgccgtaaaaagcgaaggctgtgagcatgtggtcaaaaaagcctatgccggtggatatgcggatctcgccgccttccaggcacaggtccacgctgatccgggtctccttggtcctgcgctggatgacataggcccggcaagggctctcctccgcctcatatactgggatttccattatttttcctcctcttcccgccccccgtcgggagcattgtcctccaaaaacggggtgtacatcatcatcgcgtggttctccaccaccagccggtcctccagcagctctccctccagatcaaagacctggagatacagctcattgtggcggctgcatccgccccaccactcatggcgcatctcatgatgacgctccacgatctgataccggaactggggcggccggtcggagcgccactccccctccaggtccgtctctcccacccggaggcacagctggaagggccggtccgtgggattatagatcatcaggtctccgtagggatagaagcaggtggctccgctcccaaagggctgggtccggttggagtcgggaaagacgtcgtagccatggcggtgacgctccttcacctccagcggggtgtgcagggtcatccaaaagatgagattggacagctgacacagccccccgccgcatccgtactgcacggtcccgtttttcagcagcacgccgtccagataccccttccggtaggtggggcggccgataagcttccaatagctcagcgtctcccccggctggaccacgatcccgtccagccgggccaccgccagcttcaaattggtgatcttattgtgctgatactgcatctccacatccttcagctttcggagcagaggggtgtggtgggccatatggacgcagggcagcctgtccttctgccgctgggaggcgaaccgatacttgccggacatccacagcaggtaccgccgcgccgagtagtaggcggtccccaggcacaggcgcagggcggagcggtgcttggaccgcaggccgtggggatctgcccgcttggacattctcatcccgatctcctttcccgttccccctccgggggctgtcagccgtccatccgcacccggatggagttggcgtgggcagtcagatgctcggtctctgccagtgtgatgatctccccggcaatgggcgccagggcggctcggtcgaattccagcacgctcatggtcttcaaaaagctgtccacgctcaggggcgagaagaagcgggcggtgccgctggtgggcagcacatggtccgggccggccagatagtcccccaggggttccggcgtataggcccccaggaagaccgctccggcgttcttcaccagaggcagcagggccctgggctcctccgtcatgatctcaaggtgctccggggcgatctcgtttgccagctccacacagcgctccaggctgtcacagacgatggcgcacccgaagtcccgcagggattcctccatgatctccgagcgctccagatacccggtctgccggaccacctcccggtccaccgcctgggccagctcccagctgtcggtgagcagcacggcggaggccagcctgtcgtgctccgcctggctgagcaggtccgcggccacgtacttcgggtccgccggcctgtcggcaatgaccagcacctccgaggggccggccaccatgtcgatatccagactgccgtaggccaggcgtttggcggcggccacataggcgttgccaggccctaccagtttgtccacccgggggatgaagcccgccccgtaggtcagagcggccaccgcctgggcgccgcccactgcaatgcaccggtccacgccggcgatgcgggccgccgccagcacggcggcgttcagattctcggtgggcggtgtcaccatgacgatctcctccacccccgccaccttggcggggacggcgttcatcagcacgctgctgggataggcggcggtcccgcctgggacgtagatgcccacccggctcagcccccggacaatccgccccacccggcctccgtccggtgaggtccactccatggttcgggagagcagcttctcgttgtagtcccggatattggccgcggcgtgctccagggcggcgatcagctcggccggacagctgcggtaggcctcctccagctgcgccctggtgagctcatagggctccctatggtcaaactgccgggagtagtcccggacagccgaaaggccattttcctttacattctgcatgactgctgagacagccagctcgatatctgcgtttttctgtgcggcgcgggcgcgcatggcctccagctgccgcacctcggaagtgccatccgctttgatgatggaaatcatatgtctctctccaattccgcctcacagcggtcgataaaatcgttgatctggctcttgtgcagcttcatgctggcggtattgacgatcagccgtgcggacaccggggccactgtctcgatgggcaccaggccgttggccttcagggtagccccggtctccacgatatccacaatggcatccgtcagagagaggatgggggccagctccacgctgccctcgatcttgatgatgtccacatccatccccttctccgcgaaaaaggcccgggtcaccgccggatacttggaggccactcgccgggtcttataggtcccatagaagtcggtcccctccttcactgccagagcgaagcggcagcggccgaagcccaggtccagcacctcatagaaggcgccccccttctccaggatggtatccttgcccaccacccccaggtcacataccccgtgctccacataggtgatgacgtcgggcgccttggccagcacagcgtccaggggatagttggggatggcgtggaccagccgccgccccgggtcccggacgggggtgcagtccagccccatcctctcaaacagctccaccgacttgtcctggagccgccccttggtcagggcgatacgcagacggccgctcataccttcaccaccctttctccggtcacatcaaagaccagcacagtcttggcgcccttctccctggccaggctgcagctggattccagcgtgcggcagggggagagctcacaggtccccgccggccggctgtccaccgcctccagcgccttggccaagtagccgggggcgtagtggaccacagtgtccagcgcggatggggcagcctcgggcagggtgcgggccatagcgtccacatctacggcaaagccggtggcctgggcctcccggccgaatacccccaccagcgagtcgtagcgtccgccagacagcaccgcatcccctgctccctccacatagccccggaagaccacgccagtatagtagtcgatctggtggaccatccccaggtcaaagcggaccagcgcgccgtatcccgccgcggacagttccccgtacagggctcggaggtactccaccgcctccgtctccccggccagcgcctccgcctcatccagcacctccggcccgccgaacagccgggagaggcgcagcagggccgcgctggcggggttctcccggaagggggcgagcatatcccgcagggcggcgaagtttttgccctcgatcagggcccgcatccgctccatctccccctcctccagctccatccgggcggccacatcccggaagaagccggcgtggcccagctccacatggaaccgtgaggccccgcacacccgcagggcgtccactgctgtggccaccatctccagatccgctttcatcccggcggctccgatcagctccaccccgcactgggggagctcccggttcccgccgctgtgggccggcccagcccggtacacggtctggtcgtagtacagccgctggggcaggggcagggcccgaagctttgtggccgccacccgggcgatgggggtggtggaatccggccgcatgacgcagagcttcccactttggtcgaacacctgtaccatttgttcctgggggatggcactgcccgagcgggcaaataggtcgtaaaactccgtctccggggtggagacctcccgatagccccgctggcggaagagacggatcagccgctcctgcacctgtcggcggcccatgcactcggcaaacagacggtcgcgggtgccctccggggtattgacagtcaatttcatgatctggctccttgtcaaccgcgggacagcgcgctgtctccgctttcattctttactacgctaatatactactacaagaaagtgctgtcaagaaaaatcttgcgccccggaaaaagcggcgcggagcaggacccgttccggtcctgctccgcgcaaagcaaattggggtcacagcacgagagagggggcggtgtagacccgggcggccatctcgctgttgagcatatacagccccttggcgtcctcgccgtagagcttcatctttttgatcaggtcctcggcgttcttctcctcctcaccctgctccttgacgaaccagtccaggaactgcatcgtccgaaagtccttggcactgtaagcggcttcatacagcgtgtggatcaggccggtgacataccgctcgtgctccagccccagctccagcacccgcaggcggctggtcagctccctgtcgggcttggcgatggcctccagcgtcacctttccgccgttgttctggagatactgcaccatcagcatggcgtgatcccgctcttcctgcgcctggatcttgtaccagttggcaaagccatccaggccctcctcctcatagtagatggagaaatccaggtacagataggcagaataaaactccttgttgacctgctcgttgagcagctgcgcgacctttgcgtccagcataaaaaacaactcctttttcttttttctgaaactctttctgagtcaagatcctccccctctgttccccgctctggtgcgggacagacagacggatcaggacctcgatctctccacgatctgcctctatcctaacacagaaccgggcatccggcaacctcgatcccatatctgtgcagaccgttccatcggtcaccccagcatggcgaacaggtccagctggctggtggccggcatatctccgaaagcccccgcctccgtcagcttgtcgatgtgggtcttggagaccttggggcaggcagcggagacctcctccacagagatgaacctccgtcccttagcctgctccgccagagacagggccgccgtttcccccagccccgccaccgagatgaagggcgggatcagcgccttgtgttcctcgtcaacccggaagtggagggcgtccgacaggtacaggtccatccgccggaaggtgaatccacgcagatagaactcatagcacacctccaaggtagtgagcatgtcctgctccaccgcggaggcgtccttgtccttggcgatgatctccctcatcttcttctggcacacatccatcccctggcacatgaactcctggtcaaatgccttggcccggatggagaagtaggcggcgtaaaaggccagaggccggtggaccttgaaccaggcgatgcggaaggccatcatcacataggccaccgcatgggccttggggaacagataggcgatcttcttgcaggagccgatgtaccagtcaggcaccccgtgctccttcatctcctcctccgccccctccggcaggccgcggcccttccgcaccgcctccatgatcttgaaggagcgcttggggtccatccccttggagatcaggaacagcatgatgtcgtcccggcaaccgatggcctcgctgaccttggcggtgcccgaggtgatcaggtccttggcgttgcccagccacacgtcggttccgtgggagaagccggacaggcggaccaggatatcgaactggttgggctgggtgtcctccagcatcccccggacgaaggaggtgccgaactccgggatggcagtgccgccggtgggccccaggatcttgtcgttctcatagcccagcaccttggaggactggaagatagacatggtctccgggtcatccagtgggatcttctgggggtccaccccagtcaggtcctgaagcattcggatcatagtggggtcatcgtgtcccagcatgtccagcttcagcaggttggactccatggagtgatattcgaagtgggtggtgacgatatcggtattggggtcgtccgccgggtgctgtacgggacagaagtcatagatctccttgtcctgggggatgaccaccatgccgccggggtgctggccggtggtgcgcttgacgccggtgcagccgatggctaggcggttctcctccgccttggaggccgtcctcccccgctcctccaggtacttcttcacatagccgaaagccgtcttttccgccaccgtaccaatggtcccggctcggaacacgtgggtttgtccaaacagctcaaaggtgtaccggtgggcgctggactggtactcgccggagaagttcaggtcgatatcgggcaccttgtctcccccgaagcccagaaaggtctcgaaggggatgttgaagccgtccttcacatagggcgtgccgcagacgggacagttcatatcgggcatatccgccccgcacccgtaggggtgggcggggtcctgggcgtagtcaaagtccgagtgcttgcacttggggcagcggtagtgggcgggcagggagttgacctcagtgatgcccgacatgaatgccaccagagaggagcccaccgatccacgggagcccaccagatagccgtgctccagggagttctgcaccagcttctgggcggacatgtagatcacgtcgtacttgcagcggatgatatcccccagctccacgttgatgcggtccaccacgatctggggcggctcctcgccgtagagctcatgggccttgccccataccagccgcttcagctccccgtcggagtcctcaagcttgggggcaaacagtcctttgggcaggggctcaatgggctcgcaccagtccgcgatgagattggtattcctcaccaccacgtcgtaggcggtctccttccccagataggaaaattcctccagcatctcggtggtggtcttgaagtagatgggcaggggctcgtccgcgtcctcaaagcccttggaggccagaaggatgtggcggtagatctcgtcctccgggtccaggaagtggacgtcgccggtggcgcacaccggcttgcccagctccttccccagggccacgatggcccggttgaagtcccgcagctcctcctctgtgcggaccatccccttgcggagcatgaacatattgttgcacaggggctggatctccagataatcgtaccaggaggcgatgcgcttgagctcctcccagtccttgccgtccgccaccgcccggaagagctcgcccgcctcgcaggcggagcccaggatcagcccctcccggttctcgttgatgacgcttttgagcatgatggggtaacgcttgaagtagtccagatgtcccagggagatgagcttgtacaggttacgcagaccggtctggttccgcgccagcacgatcaggtgcttgggctggcgcttggcctttcctcccttgcgcaggtggaccatggccccgttgatctcccccaggtggcgcaggcccatctcctccagcatcttaaagaacgggggcagcatgtagcccaccgtggccgcgtcgtcgctggcccggtggtgattgaaggcgggcaggtgcaggtgctccgccacgatgtccagcttgtacttgcccaggtcaggcagcaggttctgggccaggatcaggctgtcgatggagggattgtggaagggaatgccgtatttccggcagccggcggcgataaagcccatgtcgaagtcggcgttgtgggccgccaggggccggtccccggcaaaagccaggaaagcccgcagggactcctcctgggagggggcccccaccagcatctcatcggtgataccggtcaggcggatgatctccggactcaggatgcggccgggggagacaaaggtgttgaaccggtcggtgatctccccgtttttcagcactacggcgccgatctcgatgatgacctcgtacttccggttcagccctgtggtctcgatgtcgaagcagacgatctcctggtcaaagggctgttctgtttccccgtggaccactactctgtcatccacgtcgttgatgtagtacgcctccacgccgtacaggatcttgatatttttggcggagtgccacgcatccgggaaggactgggccaccccgtgatcggtgatggcgatggcccggtggccccaggcctccgcccgcttgaccacgtttttgtccggccccagcttgggaccgaccgaggtgagggcgtccatagcggacatggtggtgtgcaggtggagctccacccgcttttccggcgcgtcatccatcttcataggcttgggcaccgccatgatggacatgggctccagcaccatgtcgccgtagaaccggtccatgttcagccggccctggatctggaggtgcatccccttcttgaccccgtccacgatgggcttgccctcgtctccggggaagaatttgttcacccgaatggagccggtgtagtcggtcagatcgaaggccaccacccaggcgccccgctttttcagctcccggttgtccacggcaaagacatcgccctcgatgaccaccatgcccatgtccagctccagctccccgatgggggtaggccgcttcttgatgacatgcccgaaaatcgtcttgccggagggctttccctccccttttcccttgggtctggccgccggcgcgctcccccgggccttccgcagcgcctcccgccgaatggcctccgtccgcgcgaaggcgtccatctccggtgccgtgctctccccctgccgaggatgggccgggcgggtctggggcgcggaggcaggcacagaaggagccgccggtgccggcgcttcggcggggatctccggctccggggccgccatctgaaacttcactgaggcgagcccgtagcaccgggccacggcctcctctgcctggcggatcagattggccccggctcccctggccccatccagggtcaccagggcgctccggctggccttgtcaatggccgcggccacaatgacccagccctctacggcctccgccaactcctgccactggcacagggcagcaaacatttgtaaaaatgggatcttcttggacatgatgcagatgctccttgcgcttgattctcagtcagtgggatggtggagcgccccctgtgttacagttcctcgatcagggcaaacagctcgtccaccagccggtcctgggggacctttttcacgatctccccttttcggaacaggaggccttcgccgatgccgcccgcgatcccgcagtcggcggcagacgcctcccccggcccgttgacggcacagcccatcaccgccaccgtgatgggcttgtccacccccttcagccgctcctccacctgggcagccaggccgatcagatcgatgcgggtccgcccgcaggtgggacaggagaccagctctgccccctcccgccggaccccggcggccttcaggatgtcccgggccgcgtagacctcctccaccgggtcggcggagagggagacccgtatggtgtccccgatccccagggccagcaggcccccgatgcccaccgcagacttcagggtgcccatccggaccgtcccggcctcggtaacgccaatatgtaaaggataattgcttttctctctcatcagctgataggcccgcatggtcatggggacgctggaggacttcagcgacacacagatgtcgtcaaaatcgaatttgttcagcagacggatgtggccgaaggctgactccaccatggcctccggacagacgccgccgtatttggccagcagtcccttctccagagagccgccattgacaccgatgcggattgggatgccccgcagacggcaggcgtctgccaccgccttgacccggtcctctccaccgatattgcccggattgatgcggaccttgtccgctccggccgcgatggcctccagggccagcttatagtcgaagtggatatccaccaccactgggagcggactggcctccttgatcttggccaccgcccgggcggcggcccgatcagggaccgccacccgcacgatctgacatccagccgcagccagggaacggatctgggacagggtggactccaaatcgtcggtgcgggtattggtcatggactggatggtgaccggcgccccgccgccgatggggatgccgcccacatggatctgtctggtcattgaaacctcttcctttcccatatctggtccggctagacgccgaacagcttgcccacgtcgctgaaagtcacagccagggacagggtcagcagcagggccagccccgccatatggacgtacccctcatacttggggtcgatctttctgcggaacagcccgaagagcaggccgttcaggaacagaaagaaaatgcgtcccccatccagcgcggggaggggcagcagattcatcaccgccaggttcactgcgatcagcgcagacaggtagaggatgttatacaccgcgtcccccaccgtctcagactgggtccccacctgggagatggtggtcacgatgcccaccgggcctgacaggtcccgcagtccaaccaccccggagaccagatctcccaggctgatccagaccgtgcgcacaaaatccaggctgttgtaccagctgtacagcagcttgctgcccagggtggcggggatgatctcccgccccacgctgatcccccgcaggtatgtggtcttcccctcctcatccgtgcgggcctggaggggcatctcaacgccgtccaggcggaccttctcgccgtcccggagcaccacgaagtccagggtatcccccgcccggccgagaaagaaggtcaggttattataattgtagatccggtgtccgtccagggagtagaccacgtccccgggctggagcccgctgtcctccacaccgtagccctccagaaagccgtcgatggtgggcagcacgaaaccggtggcctgggaaaaaaggatcaggatcagcacaaagccggtcagaaaattcatgaaagccccggcgcagaggatgacgatctttttccacccgctggcccggccgaaggcccgggggttgtcgctctcctcatcctccccctccatggcgcagtatccgccgatgggcagggcacgaatactgtaaagtgtctcccccttctccttcttccagagagcgggccccatgcccaccgcgaactcattcacctgcacccccagcagcttggcggtggcaaaatgccccagctcatgggtggcgatcagcacgccgaagatcagtaccgcgatgacaacataaaaaagaacagaaccgagcatagaacctccaaaagaaaatcagtctggaccttgtctcatacggcgcgggccgcccggtccgcctccagaatgtcctccagagtgggccgctggaccacagggacctgatccatggcccgggcgacctgttctgcgatgtccaggaacccgatcttcccctccaggaaccgggccaccgccgcctcattggccccgtttaagatggcccccgctgtgccgcctgtccgcgctgcctccagtgccaggggaaggcagcggaatgtatccagatccggcgtgccgaaggtgagcggcccacagttccacaggtccagcggtgaggccggtcctgggatgcgctcaggccaggtcagggcgtattggatgggcagacgcatgtccggcgtccccagctgggcgatcatggcattatcacagtattccacaagggagtggataatactctcccggtggatcacaatggaaattttctccggaggcatgtggtacaggtgcatcgcctcgataaattccaggcccttattcattagagtggcggaatccacagtgatcttggcccccatggaccagtttggatgctgtaaggcgtcctcccttgtcattcctttcagctctgaggccgtacgcccataaaagggccccccggagcaggtcaggatcagcctcttcacacctccccggtcccggcagccctccaggctctggaagagggcggagtgctccgagtccaccggcaggatctccgcgccggacgcctccgctgccgacatcaccagctcccccgcacataccagggtctccttgttggccagggcgatgcgctttccctcccggatggcggccagggtggggcgcagccccaccatccccaccactgcggtgagcacagtgtccgcaccgggcagggaggcggcctccagcagcccctccatcccggcggccacccggacccccgtgtccgccaggcggaccttcagatcagctgcggcgtcctcctccatcaggacggccagctccggctggaaccggcgtgcctgctcctccagctcccggacgctccggttggcagtcagcgccgccgcacgcatgccacaggcggcaatcacatccaatgattgccgcccgatggaaccggtggagcccaatattgaaatacatctgctcatatgacaaaactcctcgctgaccaccgtatccgcctaaaaggctggaaacagagtcaccatcagccagagagccggagccgcaaaggtcatgctgtcgaagcggtccagcatcccgccatggccggggatcacatttccatagtccttgatcccatactgacgcttgatgagagagaaagacagatcccccagctctgtaatggcgcttcccacgagcccgtagaccaccatcagagggaaattcacttctatcccgccgaactgatgcaaaatggctccgtagagcagcatgaacagccccccgaacaggatgccgccagcatagccctccagtgatttgttggggctgacccgagtgatgcctttgtgcttcccaaagaacacccccacgaagtaggcgcccgcatccgtgaggaaagcggagatcaccggcagcaggaccagatatctgccgctctccatccccttgagtagcaccagcgtggacaggaacgccgggatcacgatcccgccgaacatacacaccagcagatcctccagggagatcgcgctgccgctgtcaaagcggcggatggcccccagaaaaagagcggccatcagcagcagggacagggcagccagggaccagttcccccaccccagccagaaggtcagggggatcaggccggccgccgccgccgtgtagacatacattccattgtggtgggccaccttggtggccctcagcagctcaaaggacgcccgcgcggtgatgcatgccagcagtaccgcgagaaagacgggcggcagaaagaacaggacaacaaaaaacagcggggccaatactacagccgagaggatgcgcgtcaccatttctcaaatacctccaaatcgccgggcccggctctgatagctggcgatggcccgcagcagctctgctttgctgaaatccggccacagcacatccgtaaagtagaactccgcataggcggactcccacagcaggaaattggataggcgcagctccccgctggggcggatgatcaggtccgggtccggcaccccgcgggagaacaggtagccggagaagttctcctgtgtcaggtggttggggtccgccctcccctctacacagtccagggcataggcccgggcggcccggaggatctcgtcccgtccgccataattcaggcagatattcacctgacagccgtcgtacctcttggagatgcgtcgggtctgctcacacaggtcccggagctcctgggacagcggagagaggtccccgaaaaactccatcttcaccttgtcccgttccatctgtccgatggcctccagcagatacttcttcagcaggcccatgatggcgcccacctcatcctccggccgcttccagttttccgtggaaaaggcatagaccgtcagatactccaggccgatctccttgcagtaggtggcgatggtgcggaaagtctccgccccggcggcatgtcccgccgaacggggcagcccccgctttttggcccaccggccatttccatccataataatggcgatatgccggggcaggtcctgaaagtcaacctgtacctccggctgaggcttctttgtaaacagcggcatatctgatcttccttacccaaacaaaatgctgagagcgcacgtgcagaatgaagaatgaacgtcttgagaacattccgcatcctgcattgtgcagcccgcatcgctcagaccgccatcagctcctgctcctttttcgcggtcagctcatccacctctttgcaccgcttgtcggtcaggtcctgaagctccttttccagctgcttctggtcatcttcggtgatctcgctcttcttgacctgttttttgatctcatccatggcctcgcgccggatgttccgaagggccaccttgccctcctcaccgtacttgtgcacctgcttggtcagatcccggcggcgctcctctgtcagctgggggaagcccaggcggatcacccggccgtcgttctggggattgatgcccaggtcagaggtctggatggccttctcgatcgccttgagcagggtgccgtcccagggctggatcatcagggtgcgggggtcgggggaggagatggccgccacctggttgagcggggtgggcgtgccgtagtactccacgaaaatacggtccagcacgccggcattggcccgtccggcacggacagaggcgaagttggccttgaccacttcgatggtcttctgcatcttggcatcgtaaacttttgtctcagggctcatcgtcgaatcttcctttctgttgtcagctggcgccttggttcagccttttacaatggttccgatcttctctcccatgaccgcccggatgatgttctgagggtccttcagagcgaagagcagcaccgggatcttgttgtccatggagagcgaggtggcggtggagtccatcacctggagatgctgagccagcacgtcgtcgtaggtgatggtgtcgtatttgaccgccttggggtccaccttggggtcggctgaataaactccgtcgatgttcttggccaggaggatcacatcggcgtcgatctccgccgcccgcaggaccgcagctgtgtccgtggagaagaaggggttccccgtgccgcagccgaagatgaccacccggcccttgtccaggtgccggatggctctggagcggatatagggctccgccaccgcccgcatctcgatggcagtctggactcggacgtccactcccttctgctccagcacgtccgccagggccagggcgttgatgctggtggccagcatccccatgtggtcggcccggacccgttccatccggtcgccgccgtccttcagcccgcgccagaagtttccgccgcctaccacgacgcccacctgcacgcccagctgggtgcactccttgatgacctcgcacacctgtccgatcacgttgaagtccagtccccgggaggcatcccccgccagggcctcgccgctgatcttcagcagcacgcgtttatactttggctgttccattggaaacactcctcgcatcaagatcaatgattcatccctattctaatataattctcctcttttgcatagggggtacggcaaagtttttcattttccctggaggagcaccgggacaccccctcccgcatagtgtgaagcggggggagccgtcagtgcgctccccgcctatcacagcggcgcgtgacccgcgccgggaaaggaacagtacattggcacaggcactgttatgggccgccggcggaacagggttcaccgctctgctcaccgccctgggggcggccaccgtatttttcttccggagccgccctgaccccacggtccaccggatcttcctggggttcgccgccggcgtgatgatcgccgccagcatgtggagcctcctgatccccgccatcgaggaggcggaggccatgggcatggtgggatgggtcccggccgctggggggtccgtcctgggcatcgccttcctgctggccatggacgccctgctcccccagctcacccctgaatccttccgccatctgggccgccggaccccccttctggtcctggccgtcactctccacaacatcccggaggggatggcggtgggcatctcctttgcgctggcctcccagggggacacccccgcccagctcaccgccgccgtcgctctggccctgggtatcggcatccagaacttccccgagggggctgccatcgccctgcctctgcgccaggaagggctcagccgggccaaatccttttggatgggggccctgtccggcgtcgtggagcccattttcgccctgctcaccgtcctgatggtgggcagcctccagccgctgatgccctggctgctctcctttgcagccggcgccatgctgtatgtggtcgtggaggagctgatcccgggcgcccacctggaggaccactcctcccggggcggaactctgggggtaatggccgggttcctgctcatgatgatcctggacgtagccctgggctgagtctacaaatatgtaaagccgccctgaggcggctgttcacaggtcctttttgatctggcgcagggcgttcttctccaggcgggacacctgggcctgggagatccccacctcggtggacacctccatctgggtctttccctgaaaaaaacggagggacaggatgcgcttctcccggtccgacagcttggcaatggcttcccgcagtgcgatctgctccagccagttctcgtccgtgtttttgctgtcccgcacctgatccatcacacagatggtatccccgctgtcggagtacaccggctcgtagagggagaccgggtccacgatggcgtccagggcaaagaccacgtcctcccgcttgagctccagcatcctggcgatctcgtctacggttggctcccgctggtgctcggccatataggcctccttggcctggagcaccttgtacgccgtgtcccgcatggcccgggacacccgcatggtgctgttatcccggaggtaccgccggatctcccccacgatcatgggcacgccataggtggagaagcgcacgtccagatccgtgttgaagttgtcgatggccttgatgaggccgatgcaccccacctggaacaggtcgtccgcgttctccccccggttggcaaagcgctggatcaccgagaggaccagccgcaggttgcccgcgatcagttcctcccgggccttcatgtccccctgcttggcccggagcaggagggcctgggtctcatcgtttttcaggaccttcagctttgacgtgtttaccccgcagatctccaccttgttttgcatctgttggaacctcctgccatgatactgtgctttcagtatctccgggacagagggtttcataccgcggggagcggcttaaaaattttaacgctcgacagggttcgatggaatttcaggaacagccggaaagcgggacagcaggcagtacgcgctctgccccggcccccatctggggccggggcagagcgcagccgttcaggccgtcacagttccttgaccgcgccgctgcgggacagggcctccgccgcggccaccgagaccgccaggccgaaaacgccctggatcaggttgcccgggatggcggcagccgcccccaagccgaatccaaggaccactccttcataggcgaagtagcccgccaccatcaccgcctcccccgccagggcgccgccgatgcgggcggccagcccccgcttttctccggctgccgcccggaatactgcccaggcgcagaccgccatgcatgctttgatcacaaaggtaccaggtgcatacagagggtatccgctgaccaggtcggccagcatagagccaagcccagccgccgcgccgccgtacattggacccagcacccacccggccagcagcaccacgcagtcccccaggttgacatagccccccgtggcaggcactgggatcttgacgatcatggtcatcacacaggtcagcgccgcaaacagcgccgcgtacaccagctttctcgttttttctccaatcatctcgctctacgctccttttgtcctgttcacaggaaaaatgtccttgcatttttccgctgtctgtattttaatcttatctggtctgatgaaaaggtccagtttcgttcttttttatcaggccagataggagggcgaccatgctcacatatgatctggaccggcgggggaccatcccccgctatgactacctctgccgctgcatccgggatgacatcctctgcggccgcctgaccgccgggagccggctcccctcccggcggagccttgcggagcacctgaaggtcagtgccgtcacggtggagagcgcctatgctcagctggctgcggagggatacatcgtttcccgggaaaagagcggctatttcgtctcccagctggagcccgccctgcgtcccccgtccccgccccccatccggaccgatgctccgcccccggggcagccctggatgatggatctgcggggaggcggcgggagcacagagctcttccccttctctgtctgggccaagctgatgcggcaggtactgtcccagcgtggtccagatctcctgcgtcccgtgccccacagcggggtccctgagctgcgggaagccatcgccggcaccctgtaccgcctgcggggcctctccgtctccccggagcagatcgtggtgggctcggggtccgaatatctgtataacctcatcgtacagctcctgggccgggagctggtctatggcgtggaggacccgggatacccaaagcccgccaggatctacgccctcaacggggcccgctgcatctccctcccggtggacggacaggggatctccccccagaccctcgccgcctccccggctcaggtggtccacctctccccctcccatcagtttcccaccggggccgtcaccccggcggggcggcgtcaggccctgctccgctgggccgcccagggcggggaccgctatctcatcgaggatgactacgacagcgaatttcgctttacagggcttcccatccctgccctccagagcatcgaccaggcggaccgggtcatctatttgaacaccttctcccgagctctggccccctccctgcgcatcagttatctggtgctgcctccccccctgctggaccgctatcaccagcgcctggggttctactcctccaccgtccccgccctggagcagtacaccctggcctccttcctctcagaggggcgcttcgagcagcacctcagccgggcccggaaccgctaccgggccctccgtgaccaggtgctggaggccctggaggccagcggcctggccggccgggcccagatctccggtgcggacgcggggctccacttcctggtccggctggagacggagcgcggcgaccaggagctgacccagctggcccgtgcgcggggcatccgcctctccttcctgtcagagttctgcgcctcccccggcccggagcaccagcactttctggtcatcagctacccgggcatccagatggagcgcctgccccagaccctgagggagctggctgcgctgctccactgagtccggggcgtaaaaactctttaggagggggcaagcaaaaaatctcactccgcccaatctcgataaatgataaaaagcgcaggagctggcgctcctgcgctttttgcagcgtcccttttcccgcctcatctgttacagcttctgctatgccgcctttcctgtaaaagagaaggctgtttagtcctggtcccctgcgggggaccgggaccaacatggggatcagtcctccccgttgatgatccgctggtaattttcctggtcggtgtccccctcggtgctcaccaggagcacccgggaggactcgttcagacccagcgcctgccgcacctctgacggggcgtctccccgcatcagggcatccagcaccccggctgtcactgcgccggactccccggacaccaccgccgggtcgccctcctccggccgggccagcagacgcattccccgggcggcgtatccgtccccgcaggacaggaaggcatccgcgtaggcatcgatgatcttccagctgatggtgcagggctctccgcaacacagacccgccatcatgctgtccatgtccccagtgacgaagtgcagcgccccgtcgtcggcctgggcggtgcggaacaggcagtcggcccggtctggctccacgatggcggtgaccggccgctcctccccccatacggaggtaaagaagcccagcgccgcaccggcgaagctgcccacccccgcctggagaaacagatgggtgggcctctccgccccctgctcctccagctgctggagggtctcggcggccaaagtggtatagccctgcatgatatgagcggggatctcctcatagcccggccaggctgtgtcctggatcaagatccagccgtgctcctccgccatccggttcgccaggcggaccgcgtcatcatagttatactcggtgatctccgcctgggcgccctgggcgcggatgttctccagccgctccgccgcgctccccttgggcatgtagaccaccgccttctggcccagcagccgggccgcccaggccactccgcggccgtggtttccgtcggtggcagtgacgaaggtgatgtcccccagcgctcggcgggcggcgggggcgcacagctcctcaaagctcatctcctccaagggcttccccagcttttccgacagacaccgggccatggcatagctcccgcccagcgccttgaaggcgttgaggccgaaccgcttggactcatccttgatccagatcttggacacgcccagactgtgggccaggccgtccagggataccagcggagtaggggcatagcccggcaggccgctgtggaagcggcgggccttctccgcctccccgggactggtcagggtcaggtcggccccgggacgctgcccccgcgggcgcaggacagatgcaaagtgttccatgcgattcactcctgttcgatctcattcccggcgtatcctcagggcgccggtctccccagcttttcgctgtattccgcccggaatgcctcaaagcgcccctcgtccagggcctgccggatgcgggccatcagctcgttatagaaatgcaggttgtgcatgacagccagccgcatggccagcatctcccccgccgccagcagatggcggacataggcccgggagaaggcggcacaggtggggcaggtgcaggcggggtcgatggggcggtcatccagcttatacttctcattcttgatgttgatggtgccctcccaggtgaagagcttgccgtggcgggcgttccgggcgggcatgacgcagtcgaagaagtcgatgccacgggccacgccctcgatgatgttggagggggtccccacccccatgaggtagcggggcttctcccggggcatatggggctccaccgcgtcgatgatgtcgtacatggtctgcgtgggctcccccaccgccagccccccgatggcgaaaccgtcacagggcagctgggcgatctgctccatgtgccgcacccgcagctccgggtaggtcccgccttggttgatgccgaagagcatctgctggggattgacacagccgggctgccggttcagccgctggtgctccgccacgcagcgctccagccagcggtaggtccgggcacaggaggcctccacgtagtcgaagggggcggggttctcgatgcactcgtcaaaggccatggcgatgtcgctgcccagattggactggatctgcatggactcctccggtcccatgaagatccgacgtccgtcgatatgggaggcgaaggtgacgccctcctccgttatcttacgcaggccggacagagaaaagacctgaaatccgccgctgtcggtgaggatggggccatcccagtccataaactggtgcagtccgcccagctgccgcaccaccccgtctcccggccgcaggtggaggtggtaggtgttggacagctcgatctgacagcccagcgtcttcaggtcgtgggaggagaccgcccccttgatggccccctgggtcccgacattcataaaaacaggggtctgggcagttccatgggcgcaggtgaacacgccacgcctggccctgccctccgtcttcaggatctgaaacacaaaaaaactcctttaccgtatcttgttccccgccggggcggggcctttgatccgccggaaaaagcccgcagctttctgtcagcccttttccctttcctgctctttgaagtccgcgatcagcatcgcgtcaccgatgctcacgcgaagcgtgattttcggattttctgcatagcaattcatcgttccctccatactttgcagatgcaaggcgcagcagtcaagaccactgcgccctactctgcaatcttccttgacgtgcctccgcaacggaggcgttctttatttctcttcctctaaggctcttatcagttcacccatgctgtggaagacttcgtaccgctcagggtgcttcgccatttcttcgacttccttcatcgcagctatggtctcctcattcggaacctcgggccgtttcttggtattgtgctccatctcagctatgaaccatcgcccggatagcctgctccacggccttgttcagcgtcacgccctcggcctgagcaaacacggacacctcgcggtgcagttcaggagggatgcggacattgaacagcccactatactccttctggggctgcttgccgatctctgcgcagaactccagataatcgtcaaccgccttgtgaaactctccctccaagtccttcgcattctcggactggaaatcaaccaaatcgctgatccccaaaatcttgccgtagaaaatgcggtcttcggcggaatactcaggccgcgccgaatatcccttgtatctcagcaaatcactgttcttcatatatgaccatgctccttcaagaattttaccaccgagtcaacggccgcttttgccatttcgtctccgggatgcggtttgtgcagcaagagcaccgcctgcgtctcggggtgatagaacttcactctcgaaccagaggtcgcgcccttgttggactccaagtacccgaagtaggccatgatctttctcaggtcagagaagcggaagtcggccggtgtgggtttcatacatagtttatccagcaacgtgtctattcttgccattcgtttttacctcgcctcttctgtaactgttttttagttacaagtatattatagcatacctgctgcctatgtcaatatatttttcaagaaaaagaccggagcatggctaccccggtctcttccctactcagtcttcggttttcaaggtgccaacgcgccgccgaacatcgttgacggcgtagatggcatccaccactcggcaatctccagccagacggtcgaggtcatccgacaccttcctgatggcgtccctaagggcatagaaggcatccgtcgccatgtcggctcgcgctctgtcagccggcgccacatccagctccagataggtattctcgaaagcaaacatgatggcctccacctttgcgatgtcgaaaattgcctcgttcagatttctgttcattttctttactccttcgtgatgtattggcactcgtacaccggggtaaagacttcattcatagcggcactgtcggctgctctcatgggtggggagttgttacgggccctgtgcgagcgtcgagagcaacgtccgtgcctctttttgctttccgcttctgtatttactttgcaacgtgagccgtcacgaatcggcccagcatttctctcgcgtcctccaccctgccggcagcgcagacgtcgaagatgtacgcgcagtccttggctgacatgatatgctctggcagcgtgtcgtcgcggatcgtgtcaaggaacagttcctcgcgctcatggagtgtcaggtgcgtctcccggactatgcggcaaatctgctttgcgaggcgatcctcaatgaccggctcagcgtacacgccgctcgtggcgaagtagaacgtcagcattcccagttttaaggcgtcggtatatcgtttctcgctctcaaggatctcggccatttccgtcaaccattcgacggcctgcgcgatctggccggcgcggatgcagtcgttgtactgtcgtgcggcggcctcgtagccaccgtgctcgcctgttgtcatagtcattccctccgttatcaaagaggccaaaagcgttcgcaaagcctctgtatttgtgattataccaccagtaaatgtgattgtgaagtcaggacaccgtcaggaatcgccagaaatcgtcaggagcgcgtctgtttcgcttccgtgggtgtgtgggttggtatctgcaaaatcgccgtacgcggcctctacgccgtttttacgcagaccgtctatgatggcctcttccgacggaaagaaacggagagctgccgactcgtttccgttgatccgcaccgacagctctccagtatcaggccacgaaaaccgcagctcacttttcatcagggtcgtccatcacgcactgctccccgttggggaacatctgacttccaatgcgattgtactcctcgaaaatcttgtcgaacgcctcctgccagacctcgtcgtggtcgtgctcaacgccgaccgctacatgggcaagttcgtgtgcaaggatttcgaccgcgttggcgacctcaaggctcggcttgacgaagacagcaacagatccatcatcggcaaagtcagtcaggccgtacacgggcttgccatcctcttcgtcgcggatctgcggctcccagtaaatctcgcagtccttgtctgggtacaacttcttgaacgctccccagaccatagcgaacatatcgttctggaacggcgcgatcagtcggtctttcagatccagcggagagagccgcgtctcctcgtacatccgcaggcgctctctggtctctgcgaaggcccacgccatcgtgtagagcagggcaaccacgccctcaatcgtatcaatgccgtcgaacagccactcagaggtcgcacacgaaagctccaaatcgtctttgaggcgtacgttctccaaggtttcggggctgtacttctgcagaatgtcccgcgtcacgttgctcagggtcgcgtctgagaagtcaggcgccggcccatagccgcggacgtaaacctcttcgtccttgatgaacaccaagttcagcgccgcctccacattgtcctgcgggtcgtcggtcacaatgggcacatactttttcatttcgcttcctccttctcctgctcccagcgcaggaactcaacgcttccgatgacccacttcagggtcttcccgccgtacattttctgcaactgctcaagcacgttttcggggacgctgaagctgtcgcagacgcagaccgccggcacctcgcctcggctgttgcgcaccagcaccagatcatccttcttcaagtctctctcctcgggtactccgaaaaggtagtgctgcgcatcgttcagatgatgcacgatgacgattttcatttgaaatcacctccttcgtcgcggatcaagccctgcatacgggccgcagacagcagttctccgagcaccgcctgcatcttccgaggccgatcctcttcgctggcacggtttgcctccgcagcccgccacgccagttggctgagcacccctctcaggtggatcatccggtcgtggtcttccttggcagaggcagccattcgcaacgcctccgccatatcctcgttgttccgtctggccgtgtcgtaacgggtaatgccagtctcctgatagttctggaacgccgtgtcagccttgcactgataccgctctgccagctccatcaatttctttttgtccatgtcttgctcctttctacaccgccaccatgtccagcagggcggccattgtcgtgatggtgtcgcccactttggcgacgtattcggggaagtttgcccttgcaacagccgcggccatcggcgggcaaacggcgttgccgcagcgggccacctgctcattcttggggtacggcttgccggtatagtcccggtcgatgatgtaatcgggcgggaaccccatcgcattgtaaagctctctcggggagagcatccgcaggccgatgtctgcgatgaagtagagcgtcccgccgatgctcagaagcagcaggtcgtcatcggccagcttataaccgcagtagcggttcagcagttcgcggatcagcggccaacgatacaggttctcgtccgggccagccttgcaaagcagcgtgtcgcagagggcgaaggttcctccgccgcaagcctttttctggcccgcgcctgccgttacggtctgcatcggttctgcagggctgctccccaagttgtctcccttgaacttcaccacatgggccgcgcacaccgcattgtggtcgatggccgtcaccgtcggaagcggctcttccatcttctcgccgaccacaccgctgtaatacttcaccagatttgcgcaggtcagaccgtagcggttcgaggcatccacggtggggattggagcgccgaggccagaggctcggacgttttctgtctgctcggtatggtactgaatgagcgagggcgccacgataccgcccgtatgcttggcggtaatggttttgtatgggccacgcacatcggcgacgtggccgcctcctgcgtgattacattcggccagatatggggttacaagcatctggttccctgctgtcgtcacggtatgtactggatccccggcaggcgctccgacgctgttgctggtgttcgtcgccgtgaacggtgccagcaccggcttgcagaggttgtgcttgccgctcccgaccaccgtaggcagcggttcctcaatgtcgtgtacccgtggggcctgcccctttcgttcgccgtagccggtcgggacgatgtacggctggccgctcttgatggtgaacttatccacgccgcggatgatgcgccgcatggtgttgtccgccagaggccgcaccgccttcaaattgtaccgctccttgatttcctccttggtgtcgaagatggacgggcaaggtaggctccagtcgatgatctccgccgcgctgcgccacggtttcagcctgccgcacttcacggcttcgctgtcccgcggagcgtgggtcggttcgggccacacaatgggctttccgtcgcaacgagcaatcaggacaaaccgtttgcggctggtcggtgcgccataatcagccgccaccagctcacgccattcgacctcgtagccgagatcccgaagctggccgatgaactttctgaacgtcgtgcctgccagcttctttacaggcttgccctttctgaccggcccccatgtctggaactcttcgacattttcgaggaaaatcactcgcggccgcaccaaagcggcccatctcagggtgatccacgcaagaccacggattttcttatcaacgagagccgcgcccttggccttgctgaaatgcttgcagtcgggcgagaaccacgcaccgccaacgggacgcccgcggcatacgtcacgcgggtcaacatcccaaacggatgcctgataatgctccgtgtacgggtggttcgtcttgtgcatcaggattgctgcagggtcgtgattgatggccgctgccactgtaatgccgaggccgacctccatgcccgtcgatgcaccaccgcctcccgcgaagctgtcaacgaagatttcgtcgtcaataccgatttgtgcgcagttcctcatatcttccactccccttcgtgcggctgaaggaaccggaaggtcgccgagaactgcaggtcgttgttctcttcttcctgcctctcgtaaacgacagcgtcgtgttccatcacatactccgcgatgttgtgcgcaatctccgctcggagcatcttctccatttcggcctcgtgcgttctggtaaaggcgggcacaatcttcaccgtcctgaccgtctggatgtcgtaatggaggacctgcgcgatgggcgcaggaaacatcgcctcagcgcgtgtcaggccgccgagtgcatggatgatttttgccttcagcctgtcaatccatttcatgtgcgacctccttcatcagctttccgttctgaactcggtatgctttgtcgtcccaatactcagttgcgccgactttgcgggtgtcattaccgtagaacttcttccacgacggcaagctgtcgttcacggcgtcgaaatgcaggccccatctggcacaggcttcgagcgcgttctcaagcagctctccctctcggcacgtccagagaatgagtcccgcgccagcgatctgctctgccgccgctgcgacgataatctcccagttcggagcgccaatgtctgggtatgcgtttgcgcagaggcaaccgtcaaagtcgatggcgattgccttctgcagcgtctgcgcgtactgtttccgacgctcttcgtcgtctgcccgcatctgctccaatacctcctttgccagtttcgtcgtgcatcctctgccctctcttaatttctccagcgggcattccctgcagttcggctcagcacagcacctcagcgccttcacgataacccctcgtctcatgccagcgcctcctctctgccgatctgctggaacttgtagacgaagacccacgggttcgcataccatcccaactcgtcgagttggtctgcagagatggtgctgttccagagatcccgaaaatccatgcgcatcgctctgtacggctggttccggtcaatgccttcagccttcaacccgccgccgttgatgtctccgagcctctccacggaaacgtccacgattttcaggaacgtcctcgccgcctctttcggcatgaaaatcgaggggttccacttggagccaacgccccacttggcgatgaactggtcaaatgcctctctggattccgagtcggagcgaccaccggggaactggattttcccgagcgggccacctgctcggaactcgatctttgcatccgcctcaaagcggtgcgcagactggacacgccatgtctctctaacgtagagcacgtcgttgaaccagaacttcggcttgacggtctctgcccagtcgcggaagataccgccagccccgttgtttccgcacatcaggtcgaacgtccggttctcttcatcgtagtcgaggacgaaccgtgcgccttcaggctgcgggagaactacgcgccgtgtctcagtcttttcaccggccataattttctgcaccatcgccgtgttgaacaggatcggtttcagttttgccacttgctatccctccttctggtaaagcgggtcatccttaccgagcacggggtagtccacctgcccgccttttttgatgacgacccgatattttttgttgatcccccgccgcgcccggtttgccaaggcgtaaaagccgtcgaggctggcgcatccaagggctttccgacactcggccgcgttgcctctggtcagcagttcgccgctgtatcggtcatagatttcgtaataattcatcgctccaccttctcaatgctgtccatcgacaccaaccgcttcttgttctcggcgtagtaaacgatggcgaacggcttcgggttgattgagctacattgaaagccgcttcttccgtacggagggtcattccactcacaaaaaagttccgtgcagagccatgtcacgccgacgaagactccggtgaacaaagccgttttcgtgacgaacttctcgcaggactcgtaatcttcaatctcctcgccctccgttgcgtctttcctccacagtagcgccgttcccgtgtcttcgttgtcgatctcgaagtggttgccgctcggtctgatgtatgcgctgcatgatacccaatctccaagccgcagcttcggcatttcagtcgtactcgtagtcacccaacttcacctccgtttcgcagtcggggcattcgacgtagccccagtcgtcgccccagcactcagggacatcgagttctcgccacggaaccgtgacttctctgccacagtgcgggcaagtaaatgtgaccgataccggcttcacgtcgatgtggaagcctaccgctttgctcatggccgcgcctcctttctctgcggtattttgaattagccaagtggcaaccagagggtagagcaaggctctacatcctctggagcatcacgcaatgatgaaagtattgccgtcctcggccggaatcgctctattcgggtcttacatcgactttctgatcttgacgatgcgggtagcgacatctgtgccactttcgcggaacgcccccggctccagcttgatcgtttgagcatacacgctgtcgaggaagtccctgaactccacagacttcttatctgtgcggaagaacgtgctctcgcacatgatggcaaccagaatgccgccggcgtccagcaggtcataggcgtggcgcacatggtcgatgtcctgatggcgcgtaaagggcgggttcatcacgacgcggttgatagtgccgatttccttcttcgtcacgtccagaaaatcgcggtagctcacgccatagggcttctcggacagatgccgcttcatgtcggtgttcagctcgatacagcacataccggcgggcaaatgctcccaaatgacatccgccagttggccgttgccgcaggacggctccagtacctcggatgcgctgtcgatctcggccatctcgcacattcgctcggcgacggcgcggggcgtcgggaagaactgatactcgcgcttcaggtctttcacttcctgcgtgagcatgacgttctccagcatctccgccacatcgtcatccttggcgaagacgtgagcctttgccttccggttccacttgccgcccatattctccagaactttgttgacctccgtgtaagtcttgcggtcaagctgaacgctcggcaggtaaagcaggtttccgtccgctctgcactcacccagcacattcagcacattctcaggaatctttgccatttgtttcgtcctccttatttttcaccggccgcgctccgatgaactcctcggccagttgttgatactcttctggcgtgatatatccacgccgtttctgttgcttccagtaagccatgatctcgtcgtaccgagtcttcagcgaggcgtatcgaccataggcgtcgttcagctcgcggcagacctgctcaagctccagccgcttctctgcgaaattctcggccagttcaaggctcggtgcccgtccaagtcttgcagacccgcaggcgcaacacatcttcggtgctatgccctgcacggcaaaggcagctccgcagtcaaggcatatccacttttgctgccgtcctcttgccattcaggctacctcctatcacacaggttttttccaccggcatccgcggcaggctccctcgtgttcctgcttgtacttaccgcacatatagcacagttcattgacggccgtgcggtattcccgttccagcttgcggacctcggcaggctcccggttggtgtcttcgtagtcggccagccggtagaacacggcttcgaccgtcgtgccggtcggctgagataccgtgccgtcgctgtttcgtatcgtcaggcgctccatcgtcatgcctcctgataccggatgggccgctcgccgcgctcgtcgaagtcaaggcaggcttttttcgactgacagcaataaagcggcgtcccagctcgcgggtagtgcttgttcttgcgaacctcgcagatgcctgacgctttcataggctctctgaggaagtggtggcactggccgcaacgttggccgaggctttcgggtctgaccttcagacgcccctccctctccgctttgagcaggtcgagaacgtgctgaaggctcataccgtcgcggatcagctcgtcctcgaactttctgtattccacgcaggcttcagccgggatgttggcatcctcgtacattttcaacactccgagcgccttttcaaccgttttggtctcctcggtctcgaagcaaaagtcctgctcattgatgatgtcttgcagtttcttcgcgtatttctccatctcaatactcctttgcttccggttcgtcgagccgtgcgccgcaatgctggcagaacggctctgtgcaattcacgtcctctccgcagttggaacaatgcgtgtctcccagccagtcgatgacaaggtgcgcgtggatctgctccggtcggctctcgatgatacagagcgtcttctcccgcatggtcgctgctcggttgacttcgtcctgctccagctccttgccgtccagccatttgtcaacgctgtgcatgatgccaaggatgatgtacgcctgattctccagcatttctgcagcctcttttgccactcgaatcaggccctcagctccctcgttgtctttcgagtctgcggactctctcagacgtgcggccaaatcgaccgctttgtcgaagttatccgccattcctatccctcccgtaaaaggcttctaaatcgccctgtgctttgttcacatggtcagggcaggctttgcactcaggcaaaagttcgtccgtcatctggtcgatgcggcccagacaataaatgcggtcttttacgccgtcgttccattcatgggatggatagcctcggtgccccaaggcgcatttaacggttgccatcactcgccctcctgttccacacttcgattttgtccgccttaattacaaaaccggaaagaacgcagccgttgtaccagtgcttccactccccacggtttgccgttctcatgatcgcgcccataggcttattgtctgcgccacagaacgggcagggcttcagttttacttccattgttccgcctccatctgctctatctgggcgcacagttcatccgttacgtcattaccgtagctgagttcttcgtaaccccagccaccgccgtcgctcaatttctccacatctatcccgtgctgtccaagccaaaaccctacttcacggtcgagtttggccgccaaacccgcgtagagtgcaatctggtgcattttctttcggatgtatttcggtactttcatctcaccgctccatcagcgcccgttcagcttcctcgtgggttaagaaaatcgtttttcctatggaactttccacgtatgggcagaacggggttgtatcaatgtcccaccgttcctgtattgcgaggtatctcatgttgctgactttgtgctctaagatttctccggcgaacactctgaataacgtgtcccccaccttgcacggacgcaccaccagccgcccgtcctggtcggcctcggccagcttgcgcaggcgggtataacctccgccgatgctgttcaacgcatccatcattgcgcaccactcgaacttcatactgaggacttcctgcggcgtcagctccgtgtccaaatattcccgcagcagcgggcagtgcgccgccgggaccgccgtgcagaatccgccgaccgcggtgcaattcccgttatctgtgtgccggtatttgcatctcaagcaattcacgtctcccaatgttttgcctcccttctcagtaatcgaaacaggccatgtagaagtggattttcccgtccttgatttcgtgggtgcagcacttccacaggtcgtggtagaggaaccacacggttcccatctcgttcaggtattccagattgaagtccttcaggtactttctgaggacgtcgttcacgctctcgccgcccttctgcagttccagaggaacattgaaccacggaacctctgcggtgatggggccacggggcttgcgcttctggaagtcagcgcacagatcatcaaacctcgccatcgtccccgcctccgcaatattcgttgtagatgcgtttcagatattgctccagcattccgtcctcgatatcctccagcagatcatcgagattccaccgtgccaactcaagccgctgccttacctgctctttgttggcgcggcggtattccgcaggcagatctggtgcatttttgatgatgctctggcacagctcgatttcgccgcaaagctcttcgagccgatgggccacccgcgaaaccatgcagtcgtcatgcacgagcagggtctttccttttccaatcattccgcattctcctttcctacgaaaatgccggcgtacacagcaccgtcaatcaggtaatggtagaactggtgtccctcaggaacctcgtctaccgccagcttcgtcttccgcatcaccagcggatgggtgccgaccatgacaacatactcgccatctggcacgagctgcttcatccactcgctcggcttttccgagctgtgcgtcgtgtggtcgaacaggctgatagccggtgttcccgtaatgggcagaggcgcaaagaacgtcatctgttcccacgctccaccggcaatcatgccgttactcatactgcgcacgtcccttcttggcctcggccatgatttcctcgatgttgtttcggagcaagaagcggtagtcctgcatccgctcctccaaaatctcggccgcctctctgcgaacagcctcaggtgtgatgctctcacagttgcaatgtacggccagaatcagatccttgaacgtgaacccgtcgaggatgttgtcctcggcgctcacatcgtcgcccagcttccatctcttgctttcagtctccatccctgtttcctccaaataccgcctcaatggcttcgtaccaagtcgtattctcgccgacgttgcaatcggtcttctggaagaagtagctcacgatctcaggaaggtgatgccgtaactggtttcaaactctttctcgtattcggctcggtcttcgtcggaaacggcgtccagatcttcgataccgaacgcatacgaggtcagcatacggagcgcgtccgctttgcgatactgcatctcctgataccggtacgccgcctcgatttcttccggggccatccggtaggacttgccataatactcgaagtcgatcagctctctggtgttttccatcgtaatcattttgcttcctcctgaattaccttctgaaccagctcgttcatgcagtcgaaaaaccgctgtgagcaggaagcgcctttggccttgtaatactgcagaccgtcgcacctgccgtctttgatggtgacgttcgccagcttgctgcagatccaaccctgcgttctcaggggaacacccaccttgtaccggcgcatgaggagcaaaacaatcggctcgttgtgtccgacacccccaacgcggtagtcgatgcggtcgttgttcaggcgcccaccctctcggatgattttgacggctgccttgatctcctgctttgccttcgcatttatctcctctgtctctcggtgccgcttctctgcttcttctgcggctattttttctttctctttctggatgtactcctgatgggcctcagacagcttcatgcactcgtctaacttgttcaagacgcaggctccgacataatcgggatgcgtcaggccgccgttcttctcgctctggagatagaacttaacgtggcttgcaagttgcttactgatgctggcaacccacctctcaggctggctcccaaggcgcgtaacgacttcttcctctcgcttcattgcctcggacacgctggtcggctggttccacccatcccgttctctcagctcattgaagaaggcgacccgcccctccttgctgccgtacagttcgttcaccgcgggcaggtagccgcagttgtcgatcatctggaactccgtcatgcgcaacggaatcaggtaactgttcacctcaacgtgcagtatatagcggtcattgtcgcaccgcgggtactctatctcaggctttccgtccttgcgccacagccgataggtcgtggttccgtcggcaacctccttgatgaacacagctcgcatccgacggccggtgcgattatacataccgccgtcgaacagcggcgtcatcaattttacttcaggcatctttatccctccctaaaattcggattgaaggtgtcgctgtacgcggccgttccattccagtcgtcgtaccgcaccttctcggtttgcttcccatgtcggaacgtgatgttcggacggatgcggttcccatcttcccaccagccctgatgcttatagcaggtcagccaactggcgaacggctctctgtaaagctgccgcatgaggtatccgccattatccgttcttttccaaatctctgcgtccgtgccttccaagacgcacacaaactcgacgtcaatggtcttcggcgggtttcgcgtcgagtcgttcttgtatgcgttccatgacaccttcgggaaccattcttcgcaaactttgctgtactccattgttgagttctctgcgatgtacgactcaccgagcagctcaatgtcctcctctttcatgtagagcttgccagagttgccgtcggcgtcggtgaatacgaccgtcttgcgccccgccaaaacggcgctgttgttgcctccgtacggggccgcctcttcgggcgtgatgtctctgatttcaatttccattaaacagtctcctcaaaatgaaaagccagccgcttcgcgtagctcctttgccgccacctcaagcccgtgtcggagccgctcgtcgtcttcaatctgctccatcgtaaagccgcaggcttccacggtttcctcgacctcgcaggtgtaggtgtactcgtgatcgcgaagctcgtacagaaacatatccttgatgaacccatctccggtttcatctgcctggatggcgtcctccacttccttgaagtttcgggccagcgtatcggcaatcatctgcgcatctttggcgaggcagaagccgccgccaaaggtattgcagagcttgtcggcgtcgttcttcgtaagtcccagttccttcaggacttcgtcgaagcgttcctctgtgaacgcccagtaaatcggaagtgcgttgacttcctcctgatggcgtttcttcatttctgcgtatgtgttcaccgttcgatggcctcctttgcattttcgttgaccgttatcggcgtcgtatggtgaagccgagtccgcttcaccatgaacttcttcttgcagtagaaacacggaaccttgtagttcccgttccatcctaccatgttcgctctcccgcaatgtgggcagtcaatgatgccaagcaccggcttgttcgccatagctcgttccctcctcaataccaaatcaggttgataccgccgagctgctccacgcggccggtcatcgcctccacgtccacaagtttctttggcagccgctcgtcttcgttccacgctcggatcagtttctccaactccttatcgggagtcggtacggcaaagtcgcacccgaaattgtagaccatctgatcgagcagctcctcgtagatgccttccttgccggccacaaccttctttctctggtcgccgtgaaaattgatgctgccgaggaacagtcgcccgtgcatcatcttcagcgcccgcaactgttcgcggttccagtcgttgtatgtggcatcagcttctctcggttccagatacccgccggtgctgcggatgtaatcgaactgcatctttctggcgaatgcgaacgtgatgctgccctccagcttggtcttccagtccagacttctcaggttcagttttccgttgtttgcccagcccatgtcgagctggccgtttgcgtcgctgttctcgaacgaccagaaatggtcacgatacacgcactcgctgttgacgttcacgcccctgtccttggcctcagaacgggaatagcgaaccggctgacggtcaacctcgcggttgtgctcctcgtcctccttcagatagaacaaaaccgtgttcttatctctctcggccccgtgatagctcgggcggtaagcgaccacgcccagcttctccgcaatctcgtcgagggttttctgctgctgcgtgtaccagacgtcagccgccgttaccaacttcatcgtcatcctctcctttcaaggtcatttcgtctgtgaatatcagtcggccgcatccgttgcaaacgaacccgccgctgtcgaacctgatccagtcagtgcaaccgcactccgggcaggccgcgaaaatcttcatgccgccatcctccgttcgtagtccttgatttcctcaagcgtcagccactcaggcttgccgctttcagggaaactccaccaaagggctttcatgtactcgatatggtcggctacgttgccggcccaaagatacttcgtgacccggttgccgtgcccgaggaaatactcgcaatcctgcttcatgcggtcgagcatctggtatctgagctgcaggctccatgtcagaaccgtgctgaccttatcggccacggccattactgctcacctccaacaagtgctctccatcccggctcctcaccgagccacgccgcccgcagccaatcgttcttgcagaagtaccggcgatagtggctcggcatcgagttcaccgcgaaattgcggatctggcgcttgcgctccttgccggtctgcaagcgagcctcccagccgataagctcggcctgagactcgttgatgaactggcggttgccatcaacctcaatgccaatacgctcctccgtgcaaccggagtatggattgcggcaggtgccgcaccaaaagaccttgccgacgctccccttcttgaacttgcgaccggcgatcacgcgcaccgtatcgccgacgtggattttcatggcctgcatccggttcgtgcgcccgtcgaacagggacttgccgagcgtcttccagtagtggtagaccttgcgaagcacttcaggcgtggcgtcgatctcagcgcgtccactgcaggcgcagcgggtggtgtcgaatagaaccttgtcgatggtctgcttctcttcgttccagcagatcgcgtaccagtcggaatcgtcgtagccgttgtgctcgtaccagtcgaggacgcagccctcgtagtcaggggtgtgaccgtccccgtagacgttggtgaaaatagccatcacttgccctccttcatcatcaggtcgtacagcttagccttcagctccatgatcgtcatgtcgcggtcgtgaacctccgcttcgagctggccgattttcttctgagcggcctgctcagcgtcaacagcctcccggcatcttctgtgttccacatcgcggtcatccttggcccgtttcagttctccgttcagctccttgacctgctggtgaagcatcttgttctcttccagcgcatcaatgaccgggaagttgctgtgctgattgtagaagcgagtcgcatcctcccagctccagatcttaaaagcgacctgatagaaatacttgctcagtccaacgcggccagaggaataagtaccacgcggatcaggttcgccgtcgaacccattcaggcggccattgtcattggcgagccgaataagctctttcacttcgctgcgaccgaaaatgtcttgcgctctgcaaatgtcctcaggcttggtgctcagaccgtgtgccgctacttccttcagaagttcctctgcggttttgatgctgtcatactggcttgccatatcgctgtctccttttctttgtaagagaaccggagactttcctgaactgttgctctggctatctccgattatccatctggttattttgtaactttattatactgcgatacctacctatgtcaatatgttttcgttaatttttatgaagaaattttctatctatatacgtttcagaatatgcccgtaaacagcacgtacagggcctataccgcctcgtagcgtcagcggtgtgaatggatgcagagggccgtgacggtcgtgtgcgtggtcgtacggggcgcagcgggtgtacggggcatttgggtataaaaaatcaccctcccggtcgtaaccgagagggtggcttcatcgtgcgcttattcttttttcggccccttttcgatttgggtgccatacttctccacgaatgcggcggcgacgctggattggactgtccgcagcctgtccttggacgtgtccgtgtgatactccgccatgaaataccggccttcgctgtcaacgtacaactcagcggcttcgccgtctgcattgaactcgttgacgccgtcctcataaaagctgttcgagatggcctccgcagccgcggtatcgaacgtaatcttgtcgcagttaccgcacagcctgcggccgtgcccgctgacgtgaggcttcaggatctcgccagtcttgcgcatcgtgaaggtcacatcgacgccgagaacgtccatgagtgccaaaaactcgtcagccctgatgctgttccggttcaaacgcaggttgaagttctgcggagtccaacccatttgacgggcgagccacgcctgcgagttcttcgtttttgccagagctgcatccataagttctctcgatgtcatatcttcacctccgtttcgagtatctctgtgcttgctatgatacatcgaaacagatgcaaaatcaagattttctttgccagcattatcgtttccgttcatatcgtggaaattactccccctaaatcttcggaatagtgccgccgtacacgccggccattttcagtttccgcagcgtcccaatctgcttccggttaatgctgaggccgtagcagcagtcgttgttccacacagccacagcatttgcctgcatacagagccacgtcaggaagtcgtagtaatactcccgagggcacaggtcgttcagttcttgccgcgatacgcccttcttctggcaggctaaggcgatcagcttctcttggtgcgacggaaccgcgtattccacagtcccatcctccaaaatcacgacctccaaatactgcacatacgtctgcttgtgctgttcgaggtcgaacgcgcagtagatgtcataggccatcgtgtcaggcccccgccggtgctgtcgggatgaacccacggatcagatcctcgtacagtctgcggtatgtatcacgctcagcctttaccgtcgccagttccaaagcggcctttgtatcggtctccttgccgacgacagcttcccgcttttcgacctgttgctcacgctctttcaggcgctcaatcaggccggggtatttcttgagccccagagctgtcgcaactgcgatgtcgatgtcacgcatctcttcggccgtacaccgaccgatgtaattcccgagccgctccagcgacaccgtattgatctgctcacacatgaccgtgcttgccctacccgtgctcaggatctcaacgtgggtcggcaggttacttttcggctgcgtcgtgcaataggccacctgcacggtttcggagtagcggttcccttcgtcgcaggaaacaaccacgccggggcgtcccgtatgttcctcgctcccgacctgaatgccgaacttgtggacatagaagatgtcgccacgtctgatgctgaagctcacactccatctctcccttcaaaatatcggcttcgctcttccggtgtaggccagtctgggtcgatgccacgcttgcggcggttgcgtcgccagccgttgtagaccttcacatcgcgttcgtcaatgctgtacccgacgccgcgttcggcgcggtcgtggactaacagcgggcgcggatagttcgggttccgcgccctcagaacctcgtatgcgccaacaggctcttcgagcttccatccgctttgcttcaggtatgttttgaggtcggacaacatcccgtgcctgaccgtcactctgttcttcatctgctcctccatttcctgcttccggtaaaaccgctctcggtcgaggaagcctttcgtggcgtagtattcgccagcatccatgccgcaaaaatcatcctcgctcattcgtcatcctccatcgggtgccaatggtagcggcagcccgggttctcgcattctccgttgaacatgagctgtccgcacagcgggcaggtcgtcacttcatacatctgagattccacagcttttctcctccttgcccgtcagccgcttcaacgcggccgcttgctcttcgataaggtctgcggcagcctttgccaccgtgccggcgcatttgaaccgtgctggccgctcaaacgcagggcattgctccttcgggcagcgccctgtttcgatggccgattgatggcatcgaagcgccaaaagaacttcttgcggcgtcatcatcccacctccctgttgggtctgcaacactcgcggaggcgggtgcgcatcacgtcgtaatactgcttttcattctcaatgcctatgtaccgccgccccgttctgcagcaggcaacaccgatggaggcacttccagcgcagcagtcgagcacgacctcgccggggttggtatatgtgagcaccagtctctcgcacagccataccggcttctgcgtcgggtgcaggtggctcgtctgcttatcgctggggcctttgatgacgctcctcgggtaacggtctgtgttgccgccacctttgacttccttcgtcgccttctggtaaatctcggtgcggttctgcgtgtcgatgtaatgcgtgtagctgttcaccggctgatggccgtccgtcttctgcgggttgtacgtcggctgacggcggtagaaaatcaggatgttctcatgcgcccgcatgggcattcgcttcgcatttagatggccggtggcgttgctcttctcccagatccactcgtaccgcagatttctcaggttgctgcatcccagcaccttgtcgaacggcgtctgcgcaaacagagctaccgctccatcctttttcacgacgcggtcggcttcgctccagaacgcatcaaggtcaatcggtgtgtcccacttgcagtttgttcgcccatacggcagatccgtgaaaaggaaatccacgcttcccgccggcaggagccgcatcccgtcgatgcagtctcccaaataggtcttatagttccagtctttgcgctccatgtggcaccaccctcactcgaagtacccgcagggcggctcgtcacagtaagcctcgcggtcgtgttcttcacaccacccgacaccgtttacgtcctcgtccccgaatcgctgacatccaccgcagcacatctcccgcggctctttcagggcgtgtaaggcaatgccgattgctgtgtccagctcagactcaaagcggcccttgctctgctctcgttcaatgatggcgattgcgtcgcttcgtttcatccatcacgcctccttcgcgtcgtagtgctcgcaccctaccgatacgtcgaggcttttcttggcgttctcgacctcgttgtagcgcccggtgacgatgaacatattgaagattgccaacgaccgcttcaagcagacgtcaacgtggcggcaattctgacactttcgttccatttactccgcctccttgtagcagtagtcggtgcatccgtcatcgttcaggcccggagccctgccggtgacgaacggcgctttgcagatcccgtcaggattgaacacgcaatgctcggaatcgcactcgcaacacaagctcgtcaagaacaatgcctgtgcaacctctcgatcctttggctcgcccacgagcagcagctttgcaacgccgcggctgtatcgttcgtcgaaccattcccagacctcctcccggttcgttccagccgggaagcaaaggaactgagcctcgatttcttccgtctcggggttcattggcacatccccaaactcagcccagagccgctccagccgcttgtctcgctctttcagcgtcgggattgcctttgctctctgctcgttcaggtaggcttcatagtatgcgtactcgtcctcgaaggtttcgccgctctttcggaactcgtcaagcgtgttgcaaatcaggccgaccacatcagcctcgggcgttgccttgacgtattcgtcagggtcgagttcctccgctttcaggtgtccaaagtagaaccagttgtcgccgatctggcagacagtcccatgatccatattcggatctctgacgaagcggacgcttccgtttcggatgccttcgcgcaccatgtcctcagtaatcatccaaacgtcacctccccgaacaaagcgagctgcacaatctcgtcagcgcaggcagcgtcgatttggcagcagtccacagtgccgtctttctgcacagccccgtattcgtcgaggccctgctcgacccacagtttgaagccattcaggaacttctccagatccagctcccacttctcgtcgatgtcctcgacgtcgtggagaaccagggcgccgccgcgggcaatctgctcatgcccccagtcggcacagcgccgttcttccacaacctcggcttcggagcaccagtagttgatgccgccctccaaagccgcaaccatgatgtcgtcgatgtcctctaccgtcagtttgacatcgcgctcagtgtgaacgctgaaggtttgcttcttctccatgttgtccctcctcaaaacttcgtttctccgaaaagggcgaactgcacgatcacgtccgcctcgttcgttgtcaggtcatccagaaccagccgttcatcctcaatgcggatgtggcagctctcctctatgtactgcttgatgccagcggtcagcttcgccttgtccagctcataccacgttccatcggttcctcggatggcaatttcgccgccgttggacacctgctcgcaaactcgcttgcccagaatgttaccaacggccatcacgcggtcggcccagccagcgatgccgccggcgttcagagcctcaaacaaaatgacgtcaagatcttccttcgtgatctgtaccgctacttccgctctcaggttgatgttgttcatccagatacctcctcatttcttccgcatcatcgcggacttgttcgttgagccaccgcttcaactcagatcgctcccacgattgcttctgcatcgggcgtaccggcaccatcgcagcaatgccgcccgtatctctggcaagccctttgagagcgtcgcacctttcctgtgtggcgggtacatcctcgaaaaccagcgttgtgctgccgccagatgtatataccgactttaccgtgaacggttggtcgctgatgttgacgatgtcacccggttgcaaatcggctaccgtcttcacgtcactcgccctcctcgtcgtcgatttcaggcagagccgaactcggatgctgccagtcgcagtaccagaacaggtgtcttgccttctccacgtccccgccgcactcttcaatgaagtcgttgccggtgtagcagcaaccgacgatttcctccacgtcctccgggccgttcgcgggttccgtgaccggaatcaggttcagggcaaggtcgggaatgtaaatgatgtcgtcgccctgttcaaaccgagcagccttgaagatttcgcaatcctgaccgtttctgaacgcaaacaggttgtccatgacggctccgccgagcaatttctcgcgcaattctgcctttgtcattcctgagtgcctcctctgcaaagactttcgccacagccggggcagtagtcggggtaatcgggagcgtcgcagtcctcgtaccagacgtggttacaccggaggcatctatactgccgcagttccacatcctcggcaggcccgtcgcctgtctcgtattttctctgtgcttttgccgcctgagcggcttccttttccccggccagccacatcatgcactcggtcaggtcggggaactcttccgtccaagcgtcgccggtgctattgtcgatgccgatgtactcaacgccagtctccagcacgaacaggccacgaggcccgcggtgttcgatgatggcgtttgcctcctgctggctgacgtatttgaaccaccgatagtcctcatgtaccacgccgcagttggggcaaacccaaagtgggacgttgttgcgcttcccgaacctgccaaagtagatgtcccgcgaaacgtagcttccgcagtcatagcatcttgtagcctgagctgtcatttccacacctccttcagttccagcacaagtttcggatctctcgatcagaaagtccaatcgttccatccaacatctcggtcaggaagtcgtactgttcgtcgcctcccatgcggtcggcgtactccaaaacgtttcggaggatgcgagccgcagcgccgtcaatgtcgaactcttccaacagccactcatacgccttttccatattagcggccaccagccctttcgtattcatgcaccgtccggtgctcgccgtcgtcttcaatatacgggcgatggatgtcgaacccgtggtcgagcatcacctgctgcaccgcatcgacagcctcgccgatgtggtacatatcccagtcgagctcgtcctcgtcctgttccagaagaaccagcaggaaccggtacatagcgttgtcgatctcgtccagacgctcaatctggcgaggcgacagctctgctcggtcatcttcgtcatcagactcgccttgcagcacatcctccatcgcagacgccagcttgttcagcatcagtttgatgtcatcagcatccttcacaagcgtcttgaggtcagggacaccggacacccgtccctgtgcctcaatccacatcttggcgtgttcctcagcgtcgaagccattcgcataggaacggatctcgcgcaccatgtcgtccgcgttgttgacatcgtccgcgccgacgtcgaaagagaaatcttcaccggcggggctgttctggatgaactcccattcggtgtcgctttcgcggacgcaccagccaagttcctcggctttatcgagcagatcgtcgatgttcacgttgttccccaactcaccgaggtcaatctcaatgacgggcatcttctggctgaggctcgcacagtattcgcaccaagcgtcagtcggttcgtccgtgtcttcgtcgtaatcgcagagggcgaggctttcgatgccagcggcctgcgcaatctcgcgcatcacgtctccatagcaggagccgttgcgctcgaagccacgcatccgctctttgatgctctgctcaatgtcgtcggcctgttcctgcggaacgaccataacgctgtccatccagcggttcatttcggatttgcaccgaatggctaccgtgttttcactcatatcgtctgtcctttcctacacatccgcattgacgcggacgtaatttcaaattagccacgtggaaaccaacacccgtagaagcccctgagaggctctgtatggcacgtttccgtgcggtggtgaaagtgtatgctttccgccgtagagcacgttctcggtcttgtgcgtcggttttggcaggtgttacgccttgctgttgggactgctcagtagctccagctctctctcgatggtctcgtcgagcctgtgcgagaggttctgggtgagccacaaatcggtcggcgtgtactccgtaacatcttccccggtctgccggtagaagccatccttcgctgcccgacccatgccgtactcagctctgctctctcgccaagcatcagtcagcttgacccgatgcctctgaagctgttcgagcgtcatccgcccgatgtcctcggtaagcagcttcctcgcctgtgctatcttcatctgtgcttcctcctacaagatgccgagctgccggttacggttatgtacgtcaacgccgatctcaccaatggcggcgagcaggtcgcgtttctcttccgtgtcgtttgacgtctcccagcgttcgatggcctcctttaaggcgtcgatgtagctggcattcgtgcggagcaactccaccgccgtcttattcattccgacgcctccatttcatcgaccagttcccaccgggtcttgtactgcttctggattttccagtcaacgatgcgcatatcgttggcggtgtcctcgtcgatcacaatgtcgatgccgaagccgccacacatctgcgtctgggtatgggtgcctttgctgcgttcgcggatcagcgcgttcagagcatcgactgcggcctgctggctcttgaacgtatggcggccgacccagttcatttcctgccagcccttcgccatgttctccaaaatccagaacccgcggccgctgcgcttcatccacgcatcctgatagagaacgcgccataccggaatcagttccacgccgtcaacaacgatcttcttgtcttccatgtttacgcttcctttctggagcaaagctccggttgatactgcagaacctcttcgatgatgtgcttggccttgacgatgccgaactcctgaagaagctgctgcggcgtgtagatgtccgccatcctgaccgaccggcggccggtcgtgtacgctttcttgagcgccgtcttgctggtgtactcggtgctgaacgcccagcgcatatactcggaaccgcactggttgttgccgctacgcttgacgaagtaatacgccttccccatagctgttctccttatccgtaaatctgagtgacgatctcaacgccggcattgatggctgccgggatgtccgtcccgagctgccggtagaagtcaggatgaacaatgcactcataagctctgcacatcgtatctctctgctccgccgtgatgttgatgcggaaacccttcgcaatccgaagggcctctttgaagttgcccgcggctacggcttcgcgcacgatgtcagatttacgtttcatggtctccgtccctttctaattagccggttggttaatttgtaactttattatactgcgatacctacctatgtcaatatgttttcgttaattttacaaattatttttctgtatcatattcacatacgtttatattcggcaggcagaaaaagacggccccggcacaaggccgaggccgcccactcacgcttctgcggtcactatgtacttcttgagctcaagcagctccaacaaaatcgcgtcgatccgccggttgatggcgtcgcttccagctttagggggaggcgtcggcttctcggggacagccacctgcgtcggtgctggcagctccgtcggcgtctgctcgtctggctttcccagcttacaggcgaacaccttgccctcgatccatgccctcgtttccttgctgcatccgaagatgtccaaaatcatccgcccgcagcgttcggttacgaagtacatcggcacagaccggcgggatgcgccacccgtcttcccgttgaccggaaaaggcagtttcaccagcttcacgtcgctctcgctctttgcttcgcgctggcaccacttggtcggataggcgcagccacaggcggccagcagatcccgtgccgcatacatcgtctcgccttcgttcaggagaacgcggactgcgcttccctcctgctccacaacggctactctgccaatgaagctcttgacggtctcgctcataccgcaccgcctttctccgcttcacggttcgcaaagttcaccgcgaagatggcgttgcagacctccatgtggccggcgaactcttccatctcacccatcagcgcgtgaactctgtccttgatctcgtagaaggccaaggcgcctctgtccctcttctctgcctctccctcggccatgtcgaggaagtagaagtaggtggactcgaacatctccagaaatacatccagctttgccgcgtccgctctcaatttgtcgggggtcgtcatcataagtgtattgctcctttcgtcgttcttgacagcggccggcagccatgttacacttaccttgctctgaggtgtgtaacgcagtcacaggtggctgccgaaccgccggaacccttggtgttgcaagcactgagggttcttttttgtttcctgtgatttgattataacattttacctacctaaagcaagataggtgcgcggtaataacatttaaccgttcggataacagcaaaaacgcgaaaaagccctgcgtcagacgacgcggggctatgctcgtttttacgctcatatactttgcctatctctctttcagaatgaccccggccatctccgcaagcatctcaatctgggacggtgtcggatcggactcagaaaaaattttttgaattttttcggcctccgtgccttccacgaggtctggcaggatataattcggtgaaactcgtaattcgcggcataaagtggcgaataccggcaggctcggcaacttctttccgccctcaatctggcgcagatacgtcgaattgatgttgcaagcctctgccagcttctcagccgtcaggccgcggtcttttcgggctttgttgattctcgttccaaatagcttcttgtccactttttgctcctccaataatgtatgccgtcggttcataccacctcttctcatagcttacagccccgttgacgctcacgaaatccactgttagaatataggccatgagccagtagactataccacatgaacggaggatattttcatgggtctttcagggtctaaactctaccgcctttccggtggcaccgtcatcccggccagtgaggctctatatcccgcagaggccgatcttcagcagcttattgcagaaaatccgcaactgctgctcagctcccccaatgagggccagcgcctttacctgttgcgtcgagaacagcccgtgcgcgatgctccagatgggccagcccttttctccattgaccatctcttcattgaccaagacggtcttcccgtgctcgtcgaggtgaagcggagcaccgacaccagaatccgccgcgaggtcgtaggccagatgctcgactacgcctcccgtatgcgggcgtggagcgccagcgaactcaggtcgtccgcgtcgcttctggatgttccagatgatctatgggccgctctcgacggcaatctgaaggccgagcggatgcggctgattttcgcggcagactctatccctgactccttggcctccatgatcgacttcctcgaccgcagcatggacgctatcgaggtctgcggcgtcgagattaagcggtacgtttccgaggacggtgccgagctgatctcctccacgattgtcggcggtggcaattcgcctgtcaagcgggctgccagatactccactatctgggacgccgacagcatggccgagcagctcaaccagcgcgaaaactcagccatcgttccggttgtcgccgctctcacatcgttcgcctccagcgccggtctgcagatcagttatggccgcgggacgaagtttggcgtgtgcagggcgcttcggaacggccgcaaggtatttagtgtgacctcgtgggaaaagggccatacgggtctcaggacagccgttgaggtatctttaccgtcgttggtagaccagacctgcggcacgttcgaggaaggtgcgctacgctccatgctcctgacgttccccgacgcttccccagccgacgccgagcaattcatcttcggctccagccagttccagtatatcgacctgcgattacttgcagagccatcaaacctctcgcatttccagaacgccatcactcaaatcgttcaggccatccctgaagaataagaaaagcggctacgccccgaaatggagcatagccgctattttactgccctctggagccgctggaacgtcgcagaatgatggattgtatgccggcggcaacgtaaatcgacctacgctggtctttaccgatgccacagctcctcggaaacctcgaccgactcttctttgagtgcagagagccgttcctcgaactcgtattccgtgatttcgcccgtcttccgcaggccgcggagtatcgagatctcctgcgggatctccgcatagcgtttccgcaggtggtcaatgcgggagtcctgcttcgcaatctcctgccgccacccttcccagagcggcgtcgtgaactccttccattccaactcaggcagcgtcacgctcaggtcatccctcgccttgtcgtccacgttcagcggcggatggagccgcaggatgtagtagatctcgtacaggttcatatccgcttcgctccccaactccgcatactcgatcttcgtcacctgctctatgttgacggtgcggtgcatcggcttgctgaacaggtggccgcgtattctgctctgcagcggctgcttggtgcggccaacgtacacgaggcagtccccgtaccagatccgataaatcaggaacccttgcaccctcatttgacgcacctgaaaccagcaaattgtgccagacccgcactcccgtccgggcatttgcagggaatgtgcatcggcacgttatttcgcgtgaacgggttcgctgcgagctgctgatgctggatcaccttgccgagcagtgccgggagcatttcagtcggcacctcctgaggctgtgatctggacaacagccgaccgcacagcgggcatttgtaaaccggctgatacttcattccacatacccctccggtcgttgctcccaatacgcagaacgctgcgcaatcgccatgtcgatcagccagaacttttcgcattcatccatcaggacatcgaccgaccattgccctgtcagtccttgcacgtcccgcattgcatcagcgaccttatcctgaatggcgtccttgaagtgcgcgtacacgccttccaatctctctcgctcatgctcaaaaacgatcttgtcggtggcatggtacaggtgcgggtaaacatagtcatagtcccaataattcgcggtgaagatcggttttctggcgtcgaagtcgtagaagactcggaactctggccgcagaggcaggccgttgtagatgcaaggcgtcatccccgcggagctttcgatgaactttcgcaccacgatttcgtctgcgccttctgctccgcagcacatcgcctcgtagttgattaggatgaccgcccggtacagctcatgcaggccgtacaggttgcacgtcccattcgcattgaacttgttgctgaagcggccattcttgacgaacacatggccggtcagccccatctctttcagcttcgggataacgcgctcctccagatacaccttgacggcctcttcgtcctccttcgggtgctccatgtaaaatgcctcgtacagtcgcttcacatactccggttcctcctccgcacttggcagtttcgtgtagaacgtcagcggtgtcgggatgccgcagtccttaattttcggataccagaagctaaagtcgttctcgtgctctctcgtgtagtcaaacatcttttgtctcctcctcttcgtatttggcaaactcctttgccgtgtcgaggaattgcactcgctgggcctccgccagcacaaccgtgccatcccgacgttccagtacggcataggcgccggcaacaacgccgccaccatgcccgccacgcatgagtgacggcggcacgatctgcgagatttgcgtgaacccgtggaacagatagagctcttcacccactttgcacgggcgcagcttatttatgttcattcttgccctcccccgtaattcaatttcacgccgcctggtagcggcggcatctctcgccagaacctcggcacccacacaaacggaacgaacgtcgggcgttcagagccgcaaagccttttccacacgcagctaaagatgtgaccgtacgagtccttcgtcaagacctcttgcccctcccgtggtttttgctctttgagcgtgtgccatccgtcctccagcattggcatccaccatttcacatgaccgcccggttccaagccgcccaggtaaaagagaggcgcttccttcgggtcgtatgccacgagggagccatcggtcacatggccccatttgctgataatcagaaccctctcgccagcgggaggcaacgcctcctttgtggccgtccatccgtgcgccatcatcaacctccatcaccgagcataagctggccggtctggaacacctcatagagcgtcttctcatttcggtcaatcagcttcgggaagaacagctcgtccatcgtggcctgctccgtctccacgagggcgacctgcgcggcgatccagtccttcaggttgcgccacgcgatgcgctcggcctgttcgtcgtcgcacttggtacgctcttttgccatcactgccttaacgccgtccggtcgtgcttccagtcggaaaccatgcagggagccgcaacagtccagcgcgaatgtgactgccgtgactttgccgttttcggcgtagtccatcatcacctttcgtgctccgtgcgcggcgaggatgccttggatctcgccgacggtctgaaccgccggcaccttggtcgtgtagttcttaatcggcatctgcagtcctcctctcagtcgatgaaccggatgttctccgccgccgtgctccacaccttgccgtgctcgtcctcgacaatgcccgttgtgacagggacggccccattatcgaactcctcgaacgtgcttccccatgtgtggaaccatgcgacaaattcatcctcgcgccacccgtcgttcgtgcgctcatacacatgggcgatacacttgcggcagttcggcacaggcggcttcccacgcagaggtcctccctcttgccacgggcggaactgctggatcttttccagcaggcccttcggattgccgtcgaagagcaaggctcggtcatcgacatagacttttgcgggtggcttttccgccgccacatcatcgacctcaatgccgttctcccgaaggtagcgccgcaccgctcccatgccctcaggcgtggcgcatctggtggacacgaccaccaccctgtaccccgcggctctgatccgcttgatttcttcgtcaatgagcggcacgggcgggtcaggtacaacgcctgcgccctgccagccactcacataggaatggatgacgccgtcaaaatccagcaccacattcggctgatacttcatctcccaagccattactgcgcccccttgccggttccagtgctgccccagccgccgcggttcgggttgccgagatcctcgacctgctcgaactcaacaggctcgtcctgcttcacgaggcggaactggcagatgcgcgtccccttcgggatttccgtatgacggatggcaaccgccgggaagccccagatgtcatcgttaccgcagtagctatgctcgatgatgcccgcgctgttcgccatgatgacgccgaagttcttgcaggtcgagcttctgggaacgacctgcgcatagtagccggcaggcagttccatcgcaacgccgagcgaaataattttgaagtccaacggctccagaacgatgtcctcggcggtgtaaaggtcaacccactcgccatgtgactcgggcagcgggttcccgtgcgtgttgattttgactttcatgttaagccctccttgatgtttcgtatctgtaatcgtagccatcgagcctgtacgggtctttcactttacccgtacatctggcccagatggcgttttgactgatgtagttcttcttggccgcctctcgtccagaagagtaaatggcaaccacttgaccgtcctgatcgaccttcatcacggccttgcgccggtttgcgctggagattttgccgctgacctgcttgctggcgaacgacaggttcaccagctcgcaatccatctttgcgccgtttcgatggatgatgttgtaccccggcctgcgacctcccatgaaggcgtcggccatgagccatacaacaggcacatctacttttcggttgtccgctgtccgcatcttcacgcaggcgcgggttcgtccgctgatgtacggcttcaggacgtaccactcgccactctccagttcctttcggacgaccgcctcgcggttgatttggtatcggaagcgatagccggggatttctacccattccgcgctgtcaggcgtttggcttttacaccgcttcgcgctcatgccttgtctccggtttcgtccagataggtcgcctgcagatcggcgatgtgcagcaagacggccagcgggaacttgtcaaaggcgttgccaacgctgtacccgccgccttggaagtcgttatccgagaaccccatgtgccaacggattgccatagcctcctcgcggctcaggcgcataaacccagagatgatgtagacgctcttctcaccgtgcccgtaaggcagcttgtcatcgaccacatagaacgggtactgctcccacctgccctgatcgttcttgcggttgcgcatctcgaccgcatagaagttcgctttgcagatgtcgtgaagcagaccgcaaaccgcaatcgtctccatcgacggctcgttgaagcccggagtgatggttgcttcgttggcgcaaatcgccttcatgcgctcaaacacatggaggctgtgctcaagcaacccgccagggctggacaggtggaaacgggtgctggccggtgccgtaaagaagtccgaggactcgatccacgccagcagcttgtcagcgcccggtcgcgtgatattctctgtgtacgccttgatgaacttgtctttcatactcatatcctcctcaaaaatacatcatgcttagcacccaagatgccagatgcagaacgcccgcagccgcgaacagcgcgatatagacgtgcttacctctgccgctctcgccgatgacgccgacggttgccagcaccatcacgatcatcgtaaacacctgaaagaacttcacttcacatacgcccccttccatgcttcgattgcttcatcgcagaacttgccgtcgcactgaccgacaacgccctttctgccctcgcagtattcgcacagatccgtttcgagcatatcgacgatctggtcatcggtcatgtccccgtaatactcgccattggtgagcttcaccgctatgaaaacgcgcccgctgtcgatagcctgctggcaggtcctcaacttccattccaacagcacagccttgtgcatcgtcttcgttgtgcgatggccacaatggacgatgaaccagtcatgctccagaagttcggccacgctgtcaacgcggtctccctgtttgtactttctcttcattttcatgttacctcctaaaatccgttccatatttgcttgccgtgatactcgaagcattcggcatcgcagcagtcttcgggagtcagatccgcaagccgctttcggctgcgggagatgaacaggtcggagtccataggcggcttcgggttcttatccctcagcagctcgtctacctccagcagcttcgcgtaagtctgcggctggtgttccttgaggttctcgaagaaatagtttcggtggaacgggcaaaagcagcaggcggacgccttggtgtccagcccccagacatccagtatgtaggcgtagttgtcagccctcgtcagctccatatccaccaacgggaaacggttcacaaacatcgggttcgggctgtccttgcaccgctgtttttcctcgaagctgaaccccatgtgcatctcgtgggccttcttgtcctcgtcgcggagccgctggcctttcttgtagccgagcacttcccagcggacgaactttgagatgcgctccaccttgtagtcgagggtgcagtttcgcggcatccttgacttgtgaccgtcatcccgcagcgtccaccatgggatgctgaccgtgcggcgtctcccgaagttctgcatcagatcccgatgcagcggtgcgtccagcatctcatatcgaatgccggcggtgtcacaggctcggtgtacgaactcggcctgttgcgcgacccacgggggctcgaagccgaggtcgcagaagacgaccagatcgtaaaccggaaccagcgggtacgggcgttcgtggcctttgcactcggcgtccacattctcacaggacatcagggccaaggccgtcgattgcattcccgcaccgaaggacaaaatcttcacgtttgcccctccacgctttccccgcggcggaactcagcagccatcgtatcggccgcctcacggctgatgccgattgcctcgaactgctggtaaatctcttcgcggtcttcgggagccgcagacaccagcgcaaaggtcaattcggcatccgtcggagttggcttctcaggttcttccgcctcttcggcttcaaggctctgcgccaatccctctttgtactcagcgattttcagcttaccgaactcaatcacggctgtcatgtagtcctcgtgctcgaaaccgccttcctcgaactcacggctccaattcagaatgtggtggaacagatcgcggctgtcgatttctgcgccgttcgagccgagcatctgcgccgccagcgcagagaggtcatagacgcactcgcaaaggcggatctcgctgtcttcgcccaccgtggtcacgaacttctcgccggcgtcgctgtaaccacaggtcttgcagtcccagacgtcttccctgtccggttcgtgcgtgacctcgatgcagtcattcaggcaccgaacgaacgtgccgctgtcatccagttcccagtcctgcgtgacgtgcgccgtcgcgcaaaaggtctttccgccgcaacgtgggcagcgcagaacctcattttctttcaaaatcatcacttgctcctccatcactcaggcgctttttcagccctgcatatactccctcaagggtttcaacgagtccatctgcctcaaggctgtccgtcgaaaccagcctgcaatcgctcatgctgatgtcgtcgatcaggtggacaccgtagaactgttcgtcaggctccagaccggccttgttctcgatcagcgccgccgttacctctccgtcccgttcttccgcggcctttgccacgaggaagtaggtcgaagagcggtcgccgttggccgtggtggggccgttgcccagatccgccatcatcgcctctgccagttctttcggggcgattgcaaaatcgaaccttttcatccctcgggccacccttccatttcttccttgaagtagtcctcgtcgccatcatcgcaggcaccggacataatctgcttgcccttgtagagtacgaagtaccacattccgtcggggttccccaccatcttgcgccacgccgctgcaaagtcggccacgctgttgaagacgtagcaggtgcggatcgtggccgcatctttgaagtcatccacgaagttttccgcatccttctcggggttgctgtcatccgcgaacatcatcacgaccagccccctcgggatagccacatcgaaggactgcccgcacttcgggcaaatccctttccagccgaggccgtcacgcacgatggcctcttcaaactcgaacccgcagtccgcacaggtcaatttcatttcaaaccctcctcaaacatttcgatgtaactgtccgcgctctgaagctggcgctccacctccgcatccgtgtttgctgtgaagcagtaccgcgccaccgcgtaacccttcttgctgatccaccaacttgtcttgctgttgaacgcatttctgaccggggagaaaacgtagtccccgaaaatccgttgctccggtgtcgtctttgccgctgcttctgcggccttggccttcgcctgccaccatttcagcttgcggtcgagcgagtcaaacgctcgggcgaagtcacagggagcatcgccgtagcagacatctctgcagtgcttgcggtacgggcacagtctgcatcttttcatcagaacgccctccggtacacacgcttgacgctgatgaacgtcgcctccgggtgcttcagcaggtagaaccgccgctggctctcgttcgggtaggtgttcccgttttcgaggcggccgagcagatggtggttctcgtcgaagagttccacgaagtaggccgtctccacgcccatgttcgggtcatccttggcgtaatcgtcgaggacgggcaggtgctcaacccgtgttccatctcttttcaggtacatatcagatcctcctattccatcgcggccctcagggcctcgattgcttccgtgatgttgtcgtgcgccgtgtccagattgtcggccgcggcttcaatggccgcatagcgttcgctgccttccagcccctcaggagcattgtcgaacttctcctgctcgtcgtcgtgcaggctctccacctcgtcgccgagggttgcaagggcgttgacgattttctcaatggccgcccgcgttgctttgttcatggctcctcctcaatagtcggcgtcgaggttttcatctcgctcgtcgtacttgactccgtcgtagccggtggtcgtcatgatgcgctcgtagcacttcgcacagacacggcgaaacgggatgccgtagtagtcacgggtgccgtacatctcgaacgggcgcgcctccttgccgcacttcgggcaggtctctttcaccagccgatagcccggaagcgacgtcaggtggccgccgtcatcaatcaggaagtcgtcccacgtgccgtcatcgaacagcttgcaggcggcttcatacgcgctgtcgaagctgtcgtactcagacaacggcttgtggtagcggcaaccggcggccacatcttcgaccttcaaaatcacgccgccgcgcccgcacttcgggcagtctgcgccgatctgcttctcgtagccgcagaatgggcagttcacgttcttcttttccatcagttctcctccttaccgagccagaccagcaaacggatctggtcgtgcatcgctacaagcctgcgctgggcatctgccagctcctcgatcatggcggggacgaacttgatgatgtcgtccacatcggagttggcgatgtaatgccgcaattcgattaccttccgagcctgccagcaccccgtctccccgatcttttggctcagttcctcaaccttgcggtcgatggacttcttcaggtcgctcatttcaaaacctccttaccgtctgcttgctctgcgccgctgacgggcaagccgtctctgacgctgttcttctctgtactgacgctccacctcttcgtcgtcctcgtaatcaggcaggcggtcaaggtatcgctgaatgaacgggatgtgcgggaaaacgtagtcggcgatcagagcgccgatgccaaggacgccgaggaacacggccagaaatgcgaagtcaacgattgcctcgcccaacagttcgggtgtcattttgccgcctccttcatcatgttcggaagttcgtacttcacgaagtcatcggccaaacaggtcgcctcttcctcaagctcgtcggcccatccgctcaggtactcctttcgagcggccgtgttcatccaattttcttttctcaacccggcggatgcgagaacaatgcagccgtctgctcccacaccgtacagttgagagccgtgcttttgctcccactcaatctccgcgtcgatggtttccgcatcagccttgatgatgtactcgaccaccgaatggtcgaaatcgtatcggaacagcttgccgctgaccttgaccagattgcttttcacaggttgtacgcctccttgcccgctttccattccttcatgaagtccttgtagtcttcctttccatctacggtcacttccgcccagaggaaccccggctctccaaagatgtcgaagtcgtagcccgtcttctccagaattgctatcaccttgtcttcctcttcttcggtgaaagagataattgccgccggttcaagcggtctcaccagcttgtcgccgaaggagttcaccgtctggcgtcccttgtactgcacgttcatgttcttgtctcctgcctcacatctgaatttcaaaccggctgaaatcatcatttgcggtcagcacgtactctttacggttgacagccacgggaacgcgctcaccgtctctgtatgccgacgtttccatgtagccggcccagcggtcatcgctctctttgcgggtcagggtcacgcgggcatggggagaaacgctcagcatattctcggcttcatacacggtgaacactgtcatgtggcgcccctcagccttgagctgctttgcaagctctctggtgttgtcgcttgcagcggtcagagcgtccagcagatccatgagaggataggtctggttcagcttcatatttgcctcctgatttgccgtctggcttctttcaattatccatgtggttatcttatgtgttaattatactttattgcctacctatgtcaataggtttttgcatatttttacgaatatttttaccatatatcattatatccgtttacgcttttgaaacaaattcagaacctttctgtacggcccgtagacggcctctggcggcgttttggcggcaggggtgaaagtatataggaaaaggcgtagcgcatcgtagcggtcttgtaggcgaatttggcggtgtgctggggccattgtggagagaaacctcctgaaaacgcaaaaacacccccatcccggccgaagccgaaatgggggtgttcaatctatccgctatgcagttgtcaggaccagcgagggggcgcaagccctctgcatggcgggcgtatcgggccggaggtcgaagcccgtttacgctttctttaggacagcctccatgatggctcgcaggatctcgtccttgcgggtcagaccgtccagctcaatgccgtattcctccgctttctttttcagctcgggaacggtcagcttgagcagctcgattgcgaggtcagcggcggctaccgccacatcagtcttcacctcttcgggcgtcttgaccacgcctgcttcgctgttcgccttgtattcgtcggcatacttccgcatccagtcgaaaatcgtctgggcgatgctctgaaggcgctcgggggtgaagattttcttcagaggggccgggatcttgacgtacaggccgttgacgacctgagacatcttttccgcgccggtcagaccggacgcctcagccagtgcaatgagttcgctcaccgcaccgaggacgttgcctctgaccttgaagaaaagcatgaagccgtaggtgatcgcacagatggcgaccacaatgatttcgagtacgctgagaaaatccattgcattttcctcctgacttgcggctcagggccgcttaatattgttcctgcttcgggtgccgctggtcatactctggacacggaaaaggctccgtgtcgtggcatttctcgcaacactcttcgcaggtgggaccgtatttctggttgtagatgcacggcttgacatctacgatctcttttccgcagaccgcgcatctcagggtgctcacgacggcagcttgagcttttggccgggacggatcacggtcgaactcaagccgttcagcgtcatgatttccttgtagcggttgccgttgccgagacgcttctgggcgataccccagagagagtcaccggcgaccaccgtatagaccgcctgctctgcgccagagtcggcgccgatgtcagcggcattgacccagccgtagacggtgcagccgccgccctgattgacgaggtggtacgggtgcttcgcgccctttgcgatactcgtcaccttggccttgccgggtttgcagggcactccgttcattgcctgactgctgacgtagtgcgtcttgccgttgaactggacgatgtcaccgatcttgtagtctgcgccgcttgtctggccgccggcgctgggcttcgtcggcgtgacgggcgtggccgttccagcgccgtcgtacttcgggcggccatagccgacgatcttcgcgctgttcagcgcatagctgcgacgcgcacactggttgctggtattgccctcgatggtatagaccttcgaggcatccactttctccacaaggccggtgtgggtgcagttgtcaatcgacgtaccgaagaaaatctgatcgcccgtcttcggattggacgtgtggaactgccctttctgcttgtaatacttcgcagaccaagtgcagcccgcaccgcaggaacgctcaggctggcaaagcagccgcagggcgttctcataaccgaacgcggtcacaaagcaccagtccacgaacatatcgcaccattcgtagccgttcttcttgccgttgtaccacttcgggtacttttcgtcgaagtctctggcgtactttgtccagttcgcacgaccggggttggcagtcttgttgtcgagctgactgttggacgccttttcgacgtagccgagttcgccgattgcgacggcgaccacggcggaagcgtagcatttgctcactccagacactcctttctgggccggggagccggcggcgtacttatcgtagaacttctggccgaaaccggcgcggcgggtcttcgccgcctcactctggtctgccggccgctcgaagttcagcaggacgctatcggatgcagcccgcacggtcttcgccgttttcagtgtcgagatgacgaccgtgtagccttgcagctcgttccagaggaaatcgagctgcatctccaagtcgccgatgctcttgcccttcttcttggcaaagtcgagcaggttcttcttccgactccaatatgtccactgcgccagaccgtagccagcgctatctttcacgaagttctggtacgtcccgttgtccaccgcagccgtgtaggcggcgtcggtgaagctgagggacttctcgtagctattttgcaggttggtgggaatcaggcagctttccgcatacaagttccccatcagaccggcaatcccgcaatcgggtagtcccttggctttcaggtagttccagatcttctcttcatttgtgcttccaatcagcgacatttcatgtctcctttactggtcgcggttcttctgttcagcggtgaacgacggctcgaagtcctgcgcgggctgctgtgcctcgcgctccattctctgccggtcttcctccgcccatttccgatcctgctgcttgtctttggtggtcttgatccaacccatgacgccgcactctccgccgagcagcgcgaacacacactggcacaacgtatcaggaataccgccagtcgtttcgtacagcgtgagcatacggtgcgtaaaccagacgagcgatacgccgatgatgaccagaatcaagtccatcgttttgatgcccttcttcttcacgttcatctgcggttcaacgcgacgccgcgccgtgcgattgcgaatgcgcgacgcgatgttgctcaccagccacgaaatgacgacgccaagcaggaagccggcggcgcagaacaggacgatgttcagggcgctcatgcaaccgcctccttactttttcagcggcagagcatcgacgccctcaacgataatgtcggcatctccgtttccgccgagtcccttgtggtagcagtcgtgcatggcatggaagcggcgtctgtcgtcgtaggaaatctcccccttggcgatgtatccctgcccgagatagagcaccctgtcgagcaggatctgctttagtgcctcagactgagcggcatcgctactgcggagacgtttgatgtcctcctgcagaccagtgatcgtctttgtcagttcagcggtcttatccgctttctcctcctcgcggtcttccttcgccgcctttcggccagctttgaacttccaccgttcattgatgccgttgataacggccgctcctgccgcgccgccggccacagccatcagcacggcggtcaagatttctccgatattcatactctcgtacctctctcaacagtttcttggtgtggactcgctcttcgccggtgaaccgggtaactgcatggcgagaggcatccagattgcgttcatgtaaaacgggagccggtcagaacgaccggctcccgccgctgggaggtcagatctccacctcgcaggcttccaggatctcctcgacctgcttacgcagacgagcgggcacctggtcgatggtcttcttgcccttgataatcagggtagcgtacacaacagccatttcgtcttcctcctttctcagcagatatttaagacaaaactcgcggagggcgctcatacggcgtcctctgcgagcagagcctccacggctgcccggagcctctccggaacatcttcgatggtcttctcacccttgcgaatcagggtcgcgtaaattcttgccatagctttatccctccgtagccgaagtcgctgcgatgacctgctcgtagacatcgcacaatgccatctgagtttcggtcatctggttctccagagacgagatcttatccgcaaacgcaccgtcgctgaccgcggtggtgatgctggtgagctgcgccgtcgcggcgtcgaggatcgtcttcatctgcgcggtcaggtcttccggcaggttgtcaccatactggatggcaccaatgacggcattgtccgtctcgcgcttgatccacttcttcaggaggttgcagtaggtcgtgtgcttcgtgacgtagttcttgtaagctgcgtacaacacaaccacatcggcggcagaataggtcttgacctccccaccatcgcaatggtactgctgctccttcgcgccgagcgtgacggcggtaaacatggattcgatattcgcctgatcgtgcgcctccagagagaaatgctccgtcccaccgctcagttctacgtcgataccggcgtagatcttctgctggcaggtttcgttcgccatgctgagctgcttctcggacagcgtcagcaggtcatcctttctccatacgagtcccatgactttccctccttactggaacgcgccgctcacgccggagatatatccgccggcggacgtgccgcgctccacagtgatgcggaagttgaacgccgcgccgtttaccgcggtcttattcttgaacacgatgtttgcgccgctcttggcctccgcggtgacgtcctgccacactgggctggtgtccttcgcgttgttggttgcctcgaccttgtagaccgcgccggccgggatctgccccacgaccgacatgaccgccgccgtgatgtcgccggaaaccgccagcggcgtcttcagcgtgatggtcgccttgtggacggctttcgtgaaggtggccgtgaaggtcgcactcgcctttccatcgctcacttcgatggtgatggtgtgcgttccgttgataatcttctggaactccgccgcggtgctggcgcactcgaaggtgagctgcgtaccgctggtgacattcgtgcgcgtcttcttcacgacaccgtccagcttttccgtgaccgtcagcttgtcgccatcggcatcgttgggcgtgtacttgaagctgaacgccgccgtcttactgccgaggttcacgccactcgcaccgctggtactggtgatggtcgggggcgtattcgtggatacggtgccgtcatcagagaccaagagtgtagagggaagaatcaaagcggggcggatgccgtgcgagccggatgcgttgctgccgttgtcgtcgccatcggtgttgacgtaccacacgaggttggtgtcgtaggtgtacggggagcggagccaccagttggcggccgcgccgttcaggtacgcaactcgcttcgagtctgcattattggtgacgcacgaagcaaaatagctcagtacagcaccttcgccagagtcgatatagctgtgctcatagtgaacttcaggggcgctcagcaagaagatcttgcaaggcaaaccgtttgctccctgctgcgtcgtaccaccagaaccgccgttcttgcgatacgggagctttacctgcttgattgcgccctgaatgttgctatcaaacagtttcaagaacgtgttgttcaggtaagagtggatgtcgctgctttcgtacttgttgatatttccgctctgccaaacacggttctcgtagatgtccttcatcagcagccaagtgccgttgcaagactcgtcgtacacgctggacggcttgccctgatgcacgacgatgaactctctcgccttgccgttgaccgtcagcttgacggtactgccaacggccttggtgctcaaaagcacatttgccatttcgttttcctccttgataagagttaagagtcagcccacggaggaacgtccgtggggcgttgggcataagaaaaggagccggatttctccgtccccctgttctgatgctgtttcttgtagaggttgcggcattggcgtagccttcgcttatcgcgtaccgcacggtttccgttgagtttccggtggatctccaccggctcaccgatgatagcctccaccttctttgcgtatttcgcccgcagctcgtgcgtatcgccgtatgccgcgtgtgcgtcccacgctccgaaactctggaggatagcgtccttcgtaacctcgccgcgcttgtaggcttcctcccagaacttcaccttcgcacggattcgctggatgctgtcccgtcgaagtttctggatgatgccaccgctttcggtaatgtacgaatggaagccgaggaagtcgatgccgttcctcagcggaaagatgccagtcttctggttcagctccaaaccccagccgtccatcagcgcccgaatgtccttcaggatctccttcaaccgctgtttgtctgagaggatgacgtagaagtcatccatgtatcgcccgtaatacttcaggcggtatttctctttcatcaggtggtcgaactcgtccagaaacatcagagcgagtagctggctggtctggtagccgaggggcagcccgtcggtcgtattgatgtagacgcacagcaggtcatagatctgcgggtctacgccacgcttatcgagcaacgccttcagcttgcgtttcagcttgtcgtggtcgatgctggcaaagaagtgatgcacgtctcctttgagaatccacccatcggttccgcgcatctctcgccggtagtaatcgaccatgtgctgcttcagccgcatcaaaccatcgttggtgcctttgccggtctgactggcgaaattgtcccgaatgaagctcttcgtgatggcttcatacaggatgttgtccacgaccgcatggaggacgactttgtccacgaacgcgggcgcttggacgagccgcttcttcggctcatagacataaaacacctcaaacctgctcggaacgtaggtcttggtgctcaggatcgttgacagcttctcggtacaggccagaacattcgcctcgtactgggcggttcccggctttgaccgtttccgctttctggcctccaagtaagctgcgtacagcgtttcaaagctgcacatctcttgataggtcataaactcgcttctttgctgttgttgcttcctctggtctgggtatagggcaagctccagaccagccatcactcctaacaccggtcgtcttgcccccggcagccgcagcatccaagtcgggatggcgagcctcggtgtgatgtgtttatcgtccatccatgcacagacgggcgacaggatatgactccctttgatgatggtgtactgtgttcgtcccatcggagggattactaatctcactttccatcagagcggggcggatgccgttcgagttggatgcgttgttgttgttgtagttgccattggtgttgacgttccacacgttgttggtgttgttggtgttcggggagcggagccaccagttggcggccgatgcgagtcataccctaactcaaggcggatgcctccgccatgaaccctgattacttccgtgcggactgggctgcggagcaagcggacatcaccagattgtagaggctcctgtcctccttttccttcgcttccgaacggagcttgttggctctgccgcggtctcccttcagccacgccatcgccatatacttgacgtctgtgactttcttggtccagacgcccgccttcttcacgctgatgatgccttcgtccatacagatcgtgatatactccagcagcagggagcagccgtccaccacttcctcgatcttgtggattctatcctcatacgccaccacgaagttcgtgttgttggcgcgatggatgtccgtcaggatctttttcgcggtttcgcgcatatcctctccatacattcggaaggtactctttgtgaagccctccttgtccttggtgtcaaggacgtgtacgacctcttggcagaccatcttgacatcgcagatgtcgtcgagctcggcaacccgtgtgataattgctcgaacgtcggccttgctgatgtcgccggagacaactctcgtcgcctgcttggtgtacttcagaagctcccttgctctgttgccaagcagaaactccttatcggccatgtctgcacttcctttccaggcattgcccgtttaatacggctgccagatcttcaggctcgccgatgaaaatgcagcagtcgctcttgacggtcagcgtcccataattttgagcgtgggtcataccgcagatgacaagatcggtgctgcgtctgaggtcgcacggaggcgtgatcgctgagaacaggttcccgatgatacaggaaatttcatcagcggggcgcgagaaaatgatttcctctgccatcagaactcgatcctgcccagcgatgcgttccatacgccggtcacgttgaccgcactcaggtcggtgaagccgacgctgaacggatttttcgtgatctccgtgccgtacttcagctcgattgcctttacggctgcatcaacagccgcgatggaagcgcggatgtcgccgtgagcggaagcattttcgttgtgcgccgccacatcctgatcgacgaggtcatcggtctgcttcttcgtgtaagtatcaacgtcggggcgctgagatgcggtcagtttgccgttcgcgtccagcgttgcgagcccactcggcgtaccgacctgttcggtggtcagatacttgctgtcatcggtctgagcctgaccgacatttacggttccataagccatatcgtccggttactcctttccctgattcagccagtattccgcggaaatagcggcggccggagcggtcttcgcccatacgcggatcttccccgccaacgtctggttggtcggagacatcccgcaggcgatagccgctgcctgactgttcggcgcaatggcaatgtcaacacggtctttcgccgtgattcccgccacaacgatgtcgcaataactcggataatcttccgagttctcgtcggttccccagccggtagtcggaatcgtgattgccttcgtcttctgcttgtcggccttcacatcctccatttcctgcatcgcctccgtcacggtctgcgccagattggctaccagaccgttcgtaaagctcctcgccgcttccgcacaggctttcagatggttcaggtatgtcaatttacccatgcgttactacctccaagatggataatcacggggcgagggttttgccctcgccccttttcagtctacgctgtgattacgctcagacggtggcggcaaagacctcgttcagcatctcagtcacctcattgtcggtggcgatagcgccgtgcacgacgtcggtaggctcggtgtagaccgtgacctcgtcgccattgaccttgacgttgccgttggtctcggaagcctcgaccttggtagcgccctcagccacaccgccgagcttggtgccctcagcgtcggtcatcagacgcttgccagcctcggcagcgacgaagtcatcagccttcttaccggagtcggtcaggttgccgttctcatcgaggccggcgaagttgccggaagtggcgctcttgaccttgtcggccttaccgctgatatcggtcttttcgggagtggggacgtacaggccgtcgcctttcaggacgaggacgttgccgtcttccttggagatgttgaccttgacctcgacctcataaccagcaatctcgatggtggtggaagcatccttgccggtttccttggccttgtaggtatcgaccagagcggccatgttcaggaagctgtaggcaacgctgtcggggttctcgcccttgacggcgaggaccatgacaggcttgccgtcaaggctggggttggtggagccgggataggtggcttcagcccacttgaacttggcgacgaattcggtcttcgcctgatcgaggaacatttcggtcgggaagtcgaacgtgaacgcggcagtaccgctcttgtcctcgctcgtgtagagggagacggtattgccgtcaaccttaccggacttgaacgcggcagcagcggagtcagacgccttcttcaggtcagccttggtagcgtagtcgctcttgatcttctcagccagggccttcagtgctgcgagttttgcgagtttggaaacatcgtaagccatttttgttttcctccaaaaatatactatatttgtttatcgggacgctcagatcaggcttcagatccgaacacctcgttaaacatctctgttacctcagtatcggatgcaaccgacaccgcttctgcgcccataggcgcaagatcgccagcctcattctggatgaggtagcgtttcgccacgccgtcgacaatgacggaaatttcctgaccaacgtatgcagtcggattgctcttggcatatttctctgcctcagccatcgacttccacgtctccgtgccgtcgagagaaaaggcatcctgacgcttgatcgtcagcgggaactccatcttggcgtagttgttctgagtgttattgactgccatatttcattccctcctctcaaccgagcgtgactttcagaaccgcagcgttctcgtacggaacggccggctcgaaaacccacacgttgtattccttggcggtgtagccgttggcgccttcgacggcgacagtcttcttggtgaaggtatcggtcacatcggcattcagcgcagtctcgttgatgaccttttttacaccggtcttgccggcgatgcaggcaatcacaacgcgattcgcgccagcgggaacattgacggtaatgacgccgggagcgtatgccttgccggacttggtcaggccgcggatgtacgcgctgtccagagccggcttctcggcggttgcgccgaagaagtagttgcggaacggcgtgtacgcagcggagtccttcgtcttagacccagccgcaatcgcaacagcggggttggacgcgccgccgaggttgtcctcggcctgcacaccagcaccgtgcgtcgctgtcacgcggtacttcaggcttgccacagcgttagcgccgccagcgtcgccgatgatgaagccgttgccgccgttgttgtcgctgccagcaggcagggacgcggcgtccacggatgccacctgctcagcgccgccgtcagcgatacgctcaaccttccagttggacgccacaacgccagtaccagtcttaggaccgtacttgtaggaaccggggttcagggacgcggccagataggacgcagtcgcaactggagtaccagcttccaccgcacccgcaccgctcaggccgaagccgttgatggacgggttcgccgtgatggtcggctgaagggtcttcgaggtcaggtctttcaggatcgccgcgacggacttgccagacacttcctttgtggccgtgccgttcttatccttcgtccagttgccgatgcggtcgtaatcgcccgccagcataagattctcgcgcatgatgaccttgtcggcgtccacattgccggtcattgcttcccacgccgtaccggtgtactggtacgcagacttctcgtactccttgtcgccgacgatggtggtcacgacgaacacatcgcccgccttcagggtaatgtcggtgtgcgccgcgaagtacgcctcgatgacgctgctgtcggatgcggacaggtcggacttcgtgccctcatagagtgcgccaccgcccagaccagccagagccgctgccagctcttcgtcggtcacgcaaccgtcgagattgaccgtggtgtcatccagcagttccaccgcgccgtctaccagagcgtagatgtcgtagtggcttgtctcggtgttcttaacaaggtacaggatattctcctgtgcctcctccgcggtcgggatagcttcggccttctggaacgaagcgtgacccgccttggagatagccgccagatactctttcttgatacgggtagccgtgtctttcagagcctgaaggcttgcgagtttagaggtgtcgtatgccatttaatcgctcctctcaatggtctttgccggtaacttatgggttctcgtcctcagaggggaagacttcgtccagcatggattccgtgtcttcggtggaggccatgtcgtcggggctgacgccgctggtcgatgcggtgatcgtgccgtccgctgccacagagatacctttgccgatctttacgccgccgagccgcgttgccgtagccacgggcagcacataggtcgagcctccgcctcccccactgctgctggcaccgggagatacgagggcgatggtcgcctccatatcctcgtcaggacttctctttgcccagaagcgcagcgcaccggcaagggtctgcaccgtcgggcaaaggccagcgtttttcgcggtctcaagggccgctttatgcagagcgacgttcgggaactgcgtttccgcagcctccgtcacgggaacatcgacgtagtagcgatactcgtccatgtcccacgcgccctgttcatcaggattctcctcctgccatgtccagccggtgtggggaatcgtgatgtctttgatgattgcggtgccgacaccgctgatcgcctcctgaaccatcgtccgtaccagctcctcagcctcagcggacgtgatgaacgcgccggggttgtaggtaatctggacatcggcatccaactcaagggcaatcgaaatgggatagcgccgaatgtcaatgcggttatccttgtaggcattgaccggctgcgggctgtcgcccagcgttgcgtagtagagcaggatctcctcggtgtcctcggtcttggcgaatacgccaaactcgcggagccagaagccctcctgcaaaccgccgttcaggtcgttgcggtattcgaccaccatgctcagtacgccgttctccacagtcgcgacggacgaaacgccctccgcaaccggagtgaccagcgcgaccatgtcgataggctcaacaccttcgggcatggcgccagagccgaccatgatgtgggtgaactcaatcgtcttcccagccatgaggctcgtaatgagatttcggccggcgactgttacggttccgccatagtagctcatttctgtgttcctccttcaatcgttttgttggactctgctttcggggcgctcctgccctctgccgtactttctcgcttcaagcgatccgcgacggctcggaggttttggagtttcgtgcgcttcgcagcagaccgttgcggtgaggccatcttccccgacttcatcaccatgtcggtgattctcgtttccatgacgctctgaaccgcgcttccagcgcaaacagaggtgtcataggacacttcgcgctcctgattgggcagcgtactctccaagaccgcctgcagaccggcgcccagatggagtttgaagccaaacttatagtctcgctcgacgccggggagcgtgtcctcggcgatggtcgaatacccgcccctgacgtacacatgggcgcggtaatcaatatcgcgttcgaggatgggcagcagcgtttccgtgacggcaaagccgaggccgctcagaatgtagagctttgccgtctccatctcggtcttcgtccgagcgtagagcttcaaggtaacgccagcggcgcggagcagtggcgtggtgaacagcggcgtcgtatcgacggtgccatccatttcgccggtatcaaaaatcatcgtcgcgggttctgcaggatcttccttgtagtacagaggccgatcccagaacatccgaaacgccttgatgatgtccgggtaggtgcaatcgcaggtgtttttcaggattttgtaaatcagataccgacggtaggtttcgtcgtcgatgacctcgaacgggatcgggtcgccagcgagcttgccggcctccattctggtcatcacgacgatgtcgccgacaccgtccagttgcttgccaacggctgtatgtactcccctgtcctgccgaagctggtcgtagaagtcatacacctgctgaagctgggcgcctatgacttccatgagcgcctcgatattggccttgcctcggaactgctcgacaaggtcgtttttcagggtcgctacataatcagccatcaatctccacctcgatcatctcctccttggtgtaggcccgctgacgcgccgtaatgttcttgctgcggtcggggtactgggagggtttttcatcggaggcgtccgctgaagcgtaaagctgaatgtcgatatagctgatgccagagcaggctttgtaaagctggctcatgaactgctgcggaacgacatccttgccagcatccagagcgtccatgttctccaggacgacctctctcagcaggtcaacgtagttcggcggcaaagcctcggagcggttgagcgtgatgcccaggcggaaccatgtgtaaatcgtcgtcggccgattgaaccggatcgtgatttcctcgtcgtactcaccgggcagaaccacgacggtctcgccgaccgtgttgatgccgcccgctttgttggcgaggatctgctgcgcgatttccttcgagtcgccgccatctaccacgatctcgacgctgtgcggcggacggacgatgtcgcctgcaggcgtttcggtcacgtccttcacgtccagataggtgccgtccacataccattggtgcgttgcgttctcatacggggcgacgctgcggacgccctgcacgttcagcaggattgcggagcggatgctctcaagcatattgctcgaacggttgaagattttgtccgcgtaggactggcggaactcaacgtccgtctcttcgtcacggcccgcgatgtagccgcagaggttctcgacggccagcaggccagcgtcggcgttgacgatgttcgtaatgaccccgccaggaatcaggatgtcgccgttctcttcggtgccgaaggtgataatcgacgtcaccgtctccgtggtcaggttctcggagagaatcagcacattgttcgaggcgatgtctgccgcctcgatgttcaggaactcattcgtctcgtccacggaggccgtgaacttctcgtcggtgatggccgccgcgatgcctttcagcaccgtgagcgtgtccgccgccgtcgggctataagaaaacaccgcgccattgatggctacggtgtagacgctctctgttccgagggacgcgattttgatgcaggcacgattgaacgacgtacggctgatttctctcgtgtccgtgatactcagataggttgtcgggttcgtcgcggaggaaatccgcgtaccggcggtcagcttcgttccgtccttgccggtgcaatgaatcgggtagtacgacttcgcggccgcctcacgggtggagccgccatactgggcggcattgtcgaggctccgcccctctgcagtggccgggtactgcgagaagtacaccgcttcgccaaactcccagaggtcggcgatggcgtcggccacgttcgtcagcaggtggttcagcagggactcggggttctggcgcgtattcacgccccatttctcagacaggcccgagtgcatctcttccagaatgacatccagccgcttgatattcggcccctgtggggtcaggccataatcagccatacagcgttacctcctctctaaacgtgtcctctcctacggtgacggtgtagcggaacgtcgccgttcgctttgccgggttgtaatcgaccgatgtgaccgtcgccgctttgacctccttcactttcaggatctcgtctctcacgagcgttttaatcttgatggtgttcgggttcttgatgaacacttcctcgaaccatgggaagcccagctcagggccgagccgccactcgtcataaatccagcgcagccgaatcattacggcctgtctgacgctctccgtcgtggagatgtcgccattcttggagatggcaatatcgccgtcctcattcagtctgatgtctaacacggtgaatacccccctcccagaagtagtctggaatcgccagaaatcacccagacggtgtcgtagcgcctcatgggtgtagattgttgctttcgcctgaaaactcgtagcggccttctacgggcctaatacgacaggctgccggtcacagtcaggttgccttcaacggtgacttcgggcgcagaaatcgttacagaaccgcccttgactgtcaggcgggttcccttgacatcgacgatgaccgcattttgggcgcaggcatccgcgaccacggggttcccttgggcgaacaggccgggaatacaaatcgcgttcgtcatgtcgaaggccagatccgtgctggtttcctgcccgtactgccagtagtcgaggctctgctcagccaccaccagaaggcagctatctccgggcttgaccggaaaagcgactgttgcgccctgtgcgttcccctgtgggaatacgaccggaacgccggtgacttgcgggaaatccatcgtcttcccgtccggtttcttgaacttcatcgcgggcttgaccgttgcgatgccctttgcggcgtcaaagctgacgatctgccccggcatggccgtatggatgccgcgaagcccacgttggacggtgttctggatctcctgcacaaactcctgcatcattacccctgcacctccatgagccgcgccgtacacgtccagtcaccggagatattgtccccggcctgcgtcagcttggcgacgcggaaatagcccgtgacggttttgctctccagcttcacatagtcgtcaatgtggatggccccgttcaggaagaactcgacctcccacccgatgctggtcttatcgctcgtttcggagttggcctcggtgacgcgggcagggatgcccagcagcccagagtcctcagagagaacgaagacctcacggctcatgacgtcccccggcttcttgacctgcatgacgccgttctgcagactccacacgaggccgcagcaggcgcagcccttcgtcatgatgtcgcgggcaaggccgacaaagctgaagccgttggcgatgtcggcaaactcagcgttgtacgaatacgtcaccgccacacccatctgatttgccacatcgtcgaagatggtcttccagttcaccgtgcccacatacgaaatcgtgacgtaggtatcgcggatctcgacgaggttgtctaccacctcgatctccgtcttgcggtctgcgccgtcgtgggtcgtgacgcagttcgtgacgatgccggcgaaaatcagcggcatacggcttccgtagcccgccttcagggacaggacgcagtccttttcgtccagagtggcaaggtgctccttgttcaagttccagacggtcacgcgccccgtgttctgcgtttcaaggtcggtgcgctcaatggagaaattgatgtgcagcgggacgggctggctcttcgacttctcgccgatctcgaagcccatgccgccgactttacctgcagccaagcgatactctctgtcaaagttcgcagacatcaaaatcccccctctcgttttacaaacggctttgctcaaaaagcaaaatcacgaaaaataagcaaagaaaacacgctcgtgcgtttgcaaaacgcacaccaaatatatttactggttaggttagattacggtataggttacggttacggttacggttacggttatgcgcggactgtcctcggatttcatgtgtgaccatcccacggagcgtccgcggacagtccgtaggacggatagaaaagtgggtcagtcgctatcttccgcagggcagaatacgaaactggccttcccgtcgagaaaatcattcctcccgatgtgctccagcttggtcatcacaccgaaaacaccgctcggcagcgcggtcacgccgtagaacaggttcatcgggaacctcggcacaatcttgatgccaatgacgatgggttggctctgcgtgtcgtagaggccgaacttccagaagccgccgcggtcgttccatgtgaaccgaatcagatacgcctttccattcagaacgacacggctcatgctgtcgttgaggtctgggacttcgatgatcgtgtattccatctcgtttccctcctcatgaaatcaggccgattgactttgcggcaccatagaggatgctcgacttgctgttgccggagccgctgccggagccgctgccagagccagaacccgaaccggagccaccggagcctgagcttccgctgctcccgttggacgtgttggccgtgcctgcagaagcggcggtcgcaccgctcttgccgtagctggcggggatggtcgccgtccgcgccgtcgtaatgcgaatcttgcggaacgaaattgggatctctcgggcgtagcctacctcggcgctcttgctgatggtcaggttctcaatcgccatgctggtgtaggtggcgtcgctggtgacgattgtgaccggctcggcggcgtagtacagttcctccagccgcttcgtgacctgctcaacacggccgcgcccgctgtggcttctccatgtgaccggagtatcggtgacatagagaaccatgttcagcgtttcggcgccgtggatgatcgcgtcgctgacggagaagccgctctcaacggcatactcaggaacggtagcctcgtagccatgctcctcactgataagcgcgtcgaactcgatgcctgcaatggtgacaggtctttttgctcttgccatctacgtcacctaccttgcatacgcgagggcgcgggccatctcgcccgtagagtcgcctgcggccttatccatcgccgctgcggacttctgctggccggcacggtcgccctcgaacttgttgttgatgttcacgttctgcacgacgctcttgctgacgctgttgctgcccatagccgtccgcgccgtggtggggctggctacgttggcctgcgccataatggacatatcgcccgtcagagcgccgagcgcatcgcgtaccttggccttgcccgcgctgatgcccttggtcatcaggtcgatcatgtcaggcatataggtgtggaagtcactcaacgggccttcatccggttcggagaagccgaggaagcccttgatcttgctggcgacgccggagactgcctctccgaccttaccgaccgcgcccttgatgccctcgacaatgttgttgatgatgtcagcaccccactgcagggcctgagcaggcaggctcttgatccagtcgattgcggcggtgaagccggtcacgatgctgtccttgatgtttccaatcgtgccggtgatgcccgacaggatattcgtaaacgccgtcgtgatggccgtccagatgttggtggcgacaccggatatgaactcccagatcgtcgagaacaccgtggagatggtctcccagacggcggaaaccgcaccggacaccgtctctttgatgctgttccacacgctggagaagaacgtgctgatgccttcccagatgctcgtgaagaagttcccaatcgacgtgaagatgttgacgaagaaatccttgatggccgtccaaatgcgaatggcaaaggctttgattttatcccagttcttgtagagcaggatgcctacggcaatcagggccataatcgccagaatcacaaggccgacagggctggacacgaacgagatcaccgccgagacgcctttcacgaccgaagtgaccgttcgcaccacggcgatgacggtcttgacggcagctacgacgcctatgatgacggcgatgatttttgcgatggcctcgccgaccttcacccacttatctgtgtcgatgttgccgttcgcaatctggtcggcaaggtttgcgaactgcggggcgattttatctataatcttgccgatggcctcgaacaccgtcttgatgacgctccagatgccttgaaaaatcgggatcgccacatttttgatgcccttccatacggcagtcagaatggtcttgatgttctcccaaatcttgatgatgttggcgcggaacttatccacgtcaacgcccgccctttcaagcagacttccgagcagggagttgttgccctgcatgaagttgatgaaatcctccaccagcagagcaacaataatgatttttgccgccatcaaaagagcttctttgttgactccctttagccccttgatgatggctgccacaccacttgtaatcttgtcgaacttgaacgcgaatagcagtgcgcctgccgcaatggccagtagtttcagcagattcccagatccgccgagcttgtcgttgagccatacgacagcatttcggacgcggttcatgacgcgcattgctgtgtcggagaacttcaccatcgcattggcgatagtgttcgtcactccaagcgtactgtccatctgcgtcagccagagtccccattcgcttcggatgacggtcaaggcgtctgtgattctgtactgtacgcctccaaacttttgctcaatggtgttggcattgtctacgaacgcagccttcagatctgcgaccgtcatagttctggacgatgccatctcttccagtttatcggaggtcgtgccgagcttcttgttgagcagttctaccgcttcgggtgaacgctccaaaagctggctgattgtttcgctgtcaacatagcccttggcgaaggacttgttaattgcctccataagaccggcaatatcttcattcgtcttaccggcggacttaaacagcattgttgccgcattattgaacttgaccgcttcgtcgatgttgccaaacagctctgggctttcgtgcacgaggtcggaaatcactcctgcagtttccgcatagctgcttcgcgtttgccgagcagactccatgattttcttctgaatctcagcttggtctccgagcgcggcggttgagttcttgacctgttcattgacgcgcccgaactcttccacgagggcgttgatcttggtcaagctgaacccgatgccgattgcgccgagaagtttcgtcgcggtgctcttgatgtcagagattgttccgttgactttttttacgtcgccttcgcgtactttgaagccaacctcgttgataaacttcacaatcgtcatgagcaatcgccctcctttcatggcagattttaccgctccgtgttgaccgtaccgctcaaagctgatagaatatcactcataagccgcaaggctataattcagagaggagcacacgatcatggcaaacacggttctcgccggtgattacagtggcctgatttcgttcaagggcgacaaaaaagggcttctcattaccgagaacaaattcttcggtgcgaagaagaccttcatcaacaagactaccgtagaccactacgagctggtcatgcaggagggcaattccagcatgggcagcggcgtggcccgcggcgctgttggcgcagcactctttggcggaattggcgccatcgctggagctaactccgccaaaaagaacagcgattacactgtctcaatcatcttcaaagacgggactaaggctttgtgttctcttgacgccgacaactacaaagccctcgtccgcatcatgtactgaggtgcaaatggaaaagctcgctcccacgcggagcgggctttttatctgcccatttcggcctgcatctcctcggcttggaaccgctcgatgtccctgtccatgctatacagcgcgtacagcttcagagcttcgtcgagggtgtaggcttcgtccaactcggacttcgtggcaatacccgctttgataagcgagtacattctcagctcaagctcgctgaagcgtccgaagtcgaagtctccccattttcggatgtcggagtccccttccgcagcttgtcgataaggctgccagattggattccgactctcttgaaaaaacccttgaagttcagcttgataacttcgtagcacaggatgaacatatcctgcagttcgccgcagaacacctcgtcggcaaggtctttatccagaatgacggtgttgccgtcggtgtcctcgccctgaacgctgatattctgctggtcgatcagcaggcggcgcatcatgcgctcgaccttgtcaccggaaatcgtagagagtgcgctgctgatggcaggcatagcctcctcgatgtccatgtccagcgggttcgctgcggcgtcagagccgccgtctcccgtgtcgaggccgccaaacagcggggcgatgcccgccaaaatcggggacagcaaggcggccagttcaccgctgatgttcgccgccgcaaaggcgccgaacgggcggatgtagaacgtgttctccccgatgaccttctcaatcgtctgcattcttctcatagttcataaccccctcgttatgtacggtagaggccgccctttacggacggcctctttgcgttgcttactcggtcaactcgccagagccggtgtgcagctcccactcgcggttgttggactctttgccgaagccgcgggatgcgggcttggcaggccatgccgcgtcggaactgaacaccatgccgcccttcaggtctttaatcaggatcgggaacataccgtcgccggtctgacgatcctgcttgaagcggttctgcaggaagctgttcgtctcggaggtctgcagcacggtcagcttcacgatgtaggtatcatcggggctgatgctgcggacgatctcgccgtcgcaaccgaccttcttggtgacgccgtcgccgttcgggtcgatggtgataaagctgtcgtcggcgtagccggcaacaatgtggttgccgagcgcaatcgtgacttccttcgggttgtaggtcttgatcttacccatctctcagttcctccttccttacagttcgtaggtcaggctgcccttgagctcggcgaagtggatcgcgccggccagtctggccttgaacttgcacttcgtcagtttgcgggatgccttctcggacgcggacaggctggcagccagaggaacggacgtgacgtagccgggaatctcggtgccatcctcgtcgaactcactctcggcgatgccgccggcgtcctgaccggatttcagcgaggcaatcatctggttctgcaccagagagatacctgcatcggtgtacggcaccttcgggcgggtgacgaacagattgacaacacgaagctgcatatcgttcttcaaccagtcgcggaaccggatgatgtccgcccactcgttgccgatgaccttgccgttcatgctcaggttcttgcttccgaccgtgatgaagtagttcaggctcttgtcggccagagccttcatctccgtgctggtcagcttggacgggtacacagacgcaagctgcttgaaggcggtcgtctcgctaccggactcgtagttcagccacttcgcaacgaacgccacgttgatgtagcggttcgcgggcgggatgtcctcgtcggcctgatccgtagtctcgcggccgtagacgcccaaagtgcggaagtagacgttgccgacagacggctgtaccagatcctcaccgtcctcgcggacggtgccgggggctgcgaagcagtccagctccgtgtagcagaagagcttctcctgcgtttccatgtacgcggcgatctcctcgtacttggtggggtcaacgcccgcggtgcagagcacgtaccaaccggaggtagccagagcgcgggcaatagtcgttgccggggtctccagttcggtgtccggggtgttggcaggctcattgtcctcggcggcctgcgcggcaggtgcgtcggggttggggtacgaaatagccacggtgtagagcaccgcagtaccgccgaccttgttcacctcgacggtgaactgctcctcgtcgcccttatccatcttcttcaggcggctccacacggggcaagccttgaagctggcaccgtctgtaatggcggtgtcctcgatggtcgcggtatagccgtcggcgatcagcgccgccagcatatcgaaaaggccggtgttcttgacgccggtgattgggccgtccagaaccatgctcagcttgcgggcagactccttgaaggagatggcgcagccggtaaggccctctttcttgcccgcatactgcgcgaccgcagcattggtgtccttgatggtctggccggccacaacagcgccttcggagagctgctgaacagcgatatacaccgccgtcgggcgaggactctgagcgaaggccacgcttgcggcaaggccgacagggtcggcatccgcgccgcttgtgacgaagccggcgtcttccacttcgctgatgtcagagtaaaccccaacgcgggccggggacttggcgccagtcttcggcgcaggacccataatcagcagattgtcgaagctggtatcatccacaatcggggttgcgatgtcgatgtctaccgtggcaatcatgtcgtagttcttactcattgcctgtttcctcctttatctcaacttcggtgaagtagccggtttcttcctttgccagctcttcggttccgccaccgctggcggacggctcgaatgtcggaacgacgataggctcctcctcgtcgccccaaggcccggacttgctatcagtctcaggcggctcggtaggcgtgtaggtcggctcctgcgtttccgggtctttctcgcctgtggggtactgcaggctgctttccagcagcgccgtggaagctcccactgccttttgagtaaaataaaactgaaccgtcaggcgcgaacggaactcgtagctcgtatcgttcacaacacctgtcaggttcagcgcatcgccgtcaatcaggatgctcacatcgttctgatggctccattggacggtatgctcggaattgaggaagtcggcaaaggacagcatatcgtccaccgcgttatcctcgtatgccacgaccttccctgatacttcatcgacgaccggcgaaccgttcgtgaacagatccaccgtgatcgagaagcgggagaggtaatgcccgacgacctcgccatctacgaatgtgtagttcggagcctgcgggcggtggacgttgccgggggtcagcaccacaagcggctctttttgcttggctgtgcggctctgattggcgaatacgacgttggcgccgccgaaatactgctgggtcagagcgcggaacagctccttggcctgccctactctcatggcgtatcacctccgtcggtcggctttgcgagcgacaagaaaccctcctcgtcaatcaccagcccggaatcgtccttgatgcgcaccacgccgacggtgtctgcggacgcaatggggaaattcgtaatgggcgggatctcctgctgggtcttccccgctgttgctgggtcatcctgcggcgggtcttcgatgtccgaagcccgtgcgccgtctgtcggcacgaggcaaaactgatagttcaagtgcgacagcaccgtatgatcccacggctgggcagcggtacactcgtaccagtcgcccatgtagtacaacaggtcgcccttgatgccggtagcttcgctggccggtatcagcacatcggttccgtggccttccagatgcttcatcttgcgttcgccctcaggcagcgcaagcatcgcatccgaacccatcgggtggatatgcagactggcaacaaagtcctcgtggtctgcggtgatgtaaccgcgaatgttctgcggctctttgaaccggcgtacccagtatttcttgttgaacagcgtaatgttcacggtcaatcacctcgttccttgatgacgaagtcaaccgactgcctcatgtggccggtgtctatcaacggctgctcggactttttcttcttgatggtggatggcttattcgccacgaaaccgccatcgacgatctcctgctgcacaaggcccttgcagaagacgcccaaatccttgagggccttttcggtcgtgccgccctcggccagcgtcttgttgacctgctcacaggccgctttcagttcgggctcgtggttctcgaagctctgtcgcatgaacggtctggctgggctgtcagaggtgccgagttcgttgtacgcggccacgtccgcaagggatgtgccgtcttcgtaggtctggccctcttggaacccgacctgcacttcaagccgggagagcttctgcagttgctcgaaataccttctgccctcaggcgtcaggtctgaaatgctcaacgccattacggttcctccctgtcaacagagagcgtcccgtccggttccagcttcaagccagagccggggcgtaccttgatgccgccgaggacggcgtcagaggcgacaggcacgatacacggattgttcttccctttgccgccagagctgtcaagctcaccgctgcaatggattgggacaataaccatccgtcggagttggagaaattgaacgccgtaagcggtcaaaccgagttcggcatccgttgcgaggttggaactctgattcgccccgaagctgatgctgctcccgccctcggacacgcttccaacagcgaaaccgatgccgatagcgcccatatctccgagcggattctcgccatacccggccatcttcagcttgtggcagacgagataggcaatcgcctgttcatacagcttcccgaactgcttgcggctcaccatagggcgaaccatctccacccaaaggtgaagctccgcgtcggtcagggagatgaactctttcccgatcagtcggatgtactggatggccttcatggcgctcactccttacttgttctcgtcggcagcctttgcggcagcggccttcttggcggcgtcagccttggccttatcctctgcggccttcttggcagcagcttccgcctcagccttggccttcgcgtcagcttcggcctttgccttggcttctgcctcggccttcaccttggcatcctcttccagctttctcgcagcagcctcttcgacagccttctggaaggcggcctcgctctcgtcggtctccagcaaacccttggcgatgaacgcctgaatggcgggcagcttgagggtggcctcgttgatgtccatagacgcatcgggcatgaggatcgtcgtgccgatgttgataatcttggagcccttatttctgatcttcatgatgaacctcctgttattcgtgggctgccgcagggtggctcctcgacagcctgacgttattctcgattgacgcaaatgttatggggagattgccgcgtggcaacctccccacaaaaattttcccctcttaggacacgccgaccgcgatcagagcggacagcgggtagtagacgatgacgccagcggtgcgggcctcgcagagaatgatggtctccagcttctcgacctgcagggggtactggtagaacggcatcgggttctccagagtcagcttgcgggggtcgttcttgaaaaggaacgccacgccctgggggttgccgctggtcgcgtaggggttggtctcgggagagtcggcatccagctcagcggtagacacgacgttcttgatgtacggagcgtgctcctgaatgaacgccagaaccgtggtgctggtgtcgggaatgcggcgggtggagatgtccatgaacacgtcagcggggacgcacagggtatcggggcgctcgacgttcttggtgatcttcgcaacctgcttcgccatgccgttcacgtcggcgaggatctcgtcggcggacttgtcggcccacttggtcttgccgctggcattggcgccgatggtgtagagaggaatattctggccgtcggacagaacgcccatcaggccgctttcctcgtcgccgcaccatgcgatcttgttggtcagggcgtcgatctggtaacgagcggactcacccttgcgggcgtccagagacttgccagccagacgagaagcccgcatctcctgagcggagtagccgtagctgtcgccaatggacttgatcttggcgaagctgggcttgccggtcacgtccgcacggggcaggtcggtggagtagttgtcgataatcttcgccagaccggtcttgtcgtaggtgtagtaggtgatggtctccgcgccggggtcggcctcggagctctgcgggaacaggtgcagggccgtcagttcggggtactcgacgtcgtaggactgagccttgacgtggtcgagttcacgggcgaaaaagacggaagcatcctcggcactatcgaagcgagtgccctcggaagccatgatagccttggggatcttggagccccgcagggtcatggcctcgtcgctatcatagttcatgtgctttttggtagccataattcacgttcctccttttcttacgcctgagcctgattgaacagctcaatcggggcaatctgggcgttggtatcgacaccgccgacaaagcgggccttgacggcgatggtggcggggtcgccctgatggccttcgccagaagcaggggtgccagcctcgttggtgaagcagccagcctcttcgccctcggtaatcaggtaaacgctgtcaccgtaggcaggctcgacgccctcagccacgcggccgtaaatcttgccgtagcgcatgacgccaacggcagcacccttacgaacggcgagcttgccctccagatcgtactcggtggtgcggttgttggtggtgatgccctcgaacttggcggcggtagcggccttcttgggcagggcgatattgacaccgggcttgctgccctgaacgacgcccgcgccgaacttcaggacgccgttctcctcttcattgaggaaagtgtcgatctggtgcggcgcgacatcaacgataccgccagccgcgccaataggggtggaatagccgtacttggtctgagcactcatgttacttttcctcctttgctctattctggcgacgctcgatcatcttctgacgggcggaatcagcagaaccgacgccgttgctgacaggggtgcgagagtcgcggttgaacatctgcttcttctggtagccgacgtccttcttggagcgggactcgacatcggcgacggcgtactcgaacgcagcgttcacgaacgcatcgctcttgccgtccagacgcatctcgggacgcacagccttgatgatggccttcttggcggcggagatgctcatatcctcaacaccgtcgaggttcagggccttaccgatcatgccgatcttcacgcgctggcggatgatggcgtcgataccgtcggcgttcaggacttcgccctgggtgtggtcggcgggcgtagcggtggggatggggtcatcgtcgctgtcctgattgtcggtgtcgtcgccgccctcgtcgttgttctcgtcggtggtgtcatcaccttcgtcggtctgaggatcggtgcagccagcctcgtcgaactccttctgcgcgagcagagtgtcgatgatgtcgaacaggatgtccatgtcctcgtcctgattggcaatgacgcccttcgcggactccagatcctcagggtcgccgtcagcatcgcggcggtcacggttgtccttgacagccgccaccttatcctcgacagtctgaggctcctgaccggcgggagcgacaacggtatcgtcgtcatcctgcgcggcagcgggggcgttggtgggcttggcgctgactacgggatcagtaccctcggtggggtcctcgtcggtcttggcggcgaggcgctgagcgcggcgggccttgtactcctcaatggccttggcgagctcttccggggacagaacgccatcagcgcgacgagcattcttgggagcatttttcttcttcatgacttttcctcctttgagagttcttgcaggatcacggccatcaatatttaaccgcgcctgttcaccggctctggcttcccggaccaaggccaagtggttgatgcggatgtcccgctggatggcgtcgtagtgctggccgttccactcacccggcgtttcatcgagcgtcagattgtagccgagggacagctccttcaggccgcaataccgcatctcgtcggtgttgtgaataacgatctctgcacggacgtcatccccgcttcgatacccttccgtcaggatggtgccgatctgatgcttctggacgttgtccttatccaccagacccgcatcatgcgtgatgatgatgggcttgccctgatacgaggcaagactctcagcagcgaagacttcctcagggagccgaagctccctcctgacgctcccgtcagggttggtgtactcgaagatacccgtgctggtcaggatcggcctgtccatcaggtagccttcgggagtgaaatacgtctggttcagcgggaggctgtccagacggatcacctgagataatttcggggcctcactcattgggcccacctcctttcggagtgttctgcagcgtgagcatcacttcttctcctcactctgcccgttgtctccgtcaccgtccccggccttttcagcggtcaggtcgccggcagcgaagacgcttccgccctcgtcggcgttggtttcctctgccgcagccacaacggctttggtgagttccagcgtcaaaatctggacgtgctcgatctcgtcgagaagcaaaccctgatacacgtcggtcaggtcaggggcgttctgctccacatcctgcactcccatagcgagagagtcgagcttttcactcaccttgccaagctgacgtgcaagactgctgattgcacaagcgttcttcacggcttttccttcctttcttctgaatttggcgccgggtgtgcccctgcgggagcgtcacggcttcgggtgggtctatatctggtcatcgcactcaccacctattcgctctttccaaagcggtcacgatggaaggtgcgttcccattcagcgaacttatccctctcgactacctcaggcgaacaattcttgccgcagcgtttgcggctgcgcttgcagatgcaaacggtcttaccgttctggaagtcgatgaagaccttgatcttctctttcgtttccatgtcctctcctcctcgcctgattatttcatggggatattcaccccgtcgtagtcgaacacggggattgccacacagcggcaacagtaatcctcgccggggtggcatttgcggccggtgtagactcggccagccttggtgtcgtaccacatctcaggcgggtcgttccaatcgaaggtcttcccgttcagcgccgcatggcacgggcggacgcgggaatcgtgggacgtagaccaccgatacttcttgcagccggcgtcggtctgctgcatcttcgtgatctgtgcgttcaacgtcgcaagctggtcacgggccaaaagctgggcgtggcgcttggacgtgccgtactcgctctggatgtccttctggatgtcacggatcggtcgcccgttcaagtagccatccagaatgatttgccgcatattgccaagcgtctcggtcggcaggctcttgatgtaggccacgttctcggcgatccacctttggatggcctgctcgtacagctcgcccgagtagtagtcgtccagaatgtcgatgcccagcgtgtccttgacggcgcgtttccactctcgtaccgaggtgttctgcgtcatcttggcgatctgctggattttgctgtcgaggccgaactgcgcgatgcgcttttccagagctgcagatacttcctgaagcatctgacggatgcgggcgtcgaggtcgcggctgtcatccagtcgggagtctccacgccgttcccgcttgtactcgttcatcatggcgggcagtttcttcttcagttcctcgttcagcaaccgcatataggcgccggcgatgcgccggtactcacgctctgcagattgcgggtattgcggggtggtcttcgcaggaaggggtctattcccccgaaacttggggcgtacagcctttttaaccacctcttggtattggttgttggtcaaagacaaagccccctttacggtcatttacgcaggtttggcgatgggttgcgggcataagaaaagcagggcggtcattgtccgctctgcctatttcccatctacctctgaaacaacttcaaggcagtaggcgtcagggatggtgcagagccgcccactcgtcctgggactccttcgtgtccgaagttgccagaactggggccgccgtcgagattggaggaatcacctctgctgtcgacttcctcaagcgtaagtttcacggccttatatttcccgacggaataatcagggtcagtattaacaaccttgaaccttgccttcttggaatacaggacttcatccatgtcgacgtcagccacatccttgatggaaacaccgctcttcgacttgcattcaagcacaatgttgtacgaattagggtcatcaccatctctggatctgaacactctctttagcgcatcatccccagtagaccagctcgacagatgaccgagtccaaacgtgctacctcctgacgactctgcgatgaacttgtcaaaggcatccttgtccgtcgtcatcgcacgtttagtcgtaccagcgtacttgtccgagagtgaaatcgccttttcaatggctgctgcgctcttttcggcggcagccttttcttcactgtccatcagtgaaccgcgcgtcgcatatacacccgagtacccagcagaagccgccacgacatccttatagttccttgtgtagtccgatgtcgcatcgaccatttcttgcacttcacggtcgctcagctcgcgtccagcattcttactccactctgatttctttgcagagtaaacgcctctttcgagtccatggctggtttcaccgttatatggggaggtgtttccttcgcgttcctccgagccgccgatctcgcctttacgtccctcgtgtccaaaattgccactccccggtccgccatcctcttcaaaagggtcgcgttcacctcggagaaccgccttcaggagcttcacgtcgtctgcaaacggctggaacagcgacggggtcagcagctcgatttcctccagcgttctgaactgcgggtcggccatttcgccatccacgcaattcggctcgccttcgtactcagtacacaggaagatgtacggctgaatgccggtgtcaggctccatagggcctcggccgagcgggatcagctctttcgggctgatgccgaactcttcctctgcttcacggaacgccgcctgtttcggagattcgccttccttgatgtgaccgccggggccacaaatcaggccgtggccgaactccgtctttctggttccactcagaaccttgccctgagagaccaccagaacgcctacacaggcttttatatcttcgggtgtagatgtattcccatcacccttgacatcctgtaccgaggctttagcgcgattttgcggggcattggcggctgactgttgacgttcctcgtcgctcatgtcctgcggcaacttggtcgcagcaggtgcagcggcgggagcttcaccgtctccgccggggtctttcttgtgttcttcggtgctggtgccctcggcatagtcagcgaactggccctgctcgaaaatgctctgtccaacgtcactggaaacctgaccgccctctgcaggctcgtcggggaacagatcctcgtcgtcgtattcgtcgagcatattctcgacgtcgaactcctcgctgtctgccagcttggcgcgaacctcgctcgggtcgataacctgcttgtcgatgtagagttgggcggtctgcgctctggtgaactgcgtctgtgcccgcttctggtcgaggtctgcctgttccgtgtcgctgagcgaccacaggggattgaactccaccttgatcttcggcacttcatccacttcgccggtgcgaacgccagcttggaagatgaccgacagcaggtagcgcaggttcttcttcaccatgcgcttctggatgcgctccagatagttgtaccagttttccaaatcggcgtcgccggtggcgttcatgcccgccggtgaacggccaaaaaggatggtctgaggaatcgaggtcagcgccgacaggaagttgcaggtcgagtcgatgacgtcggagacgccgctgaactggaactgcctgaagtcgtagtcctcgccttcactgtcaatggtgatgctgttcagcaggccgcgggccatgtcaatcgtctgcagacggcgcaggactctgtcctcgccctcttcggtggcaagctctgcggccagatccttcatcttgtagaccgcctgaacggagcggtcgagcagcttcgttgcgctgccgtgggccacttccgcgtcacggatggccctgttgattcgcacatactcggggatgccccagagctggtaaatcgaattggtcgtgttctcgggcaagatgccgttctggaacaccagacaccggctgtcgtgaacggtgaacgaaccggtgcggctcgtcacgtggtagaactcgggcataccgaggcgggagcctctggtgcggaacgggtcacgcgggtcgtaggagaacatactctggtagtcgggctggatcaccgagcggtcatagacgcgaatatcgtcaatcgaccggatattgcgccagtccagaggctcgtcgatgccgcggccgtcgttaatcatcatcacggcgatggaacctccgaagagccgcgcccagcggatggcggtcatggccgtttcttcccagtccagctcgtcgagggcctccgtatagaagtcctcgattttctggtctttggtgctctccagcgtgaagccgtgcttgatggcctcctctgcgggcgtgtcgatgattttcgcaaacaggccgttgccctcgtagtacatggtgagcagttcatcgggaaccacaggctcggcacggaaccgatacccttccgtggtgtccttgctcgtgccgtacttgttcatcatgttcacgtagccgtcggctcggtaggggcgaacggccttgccggtctgcatctcgatcaggtgggcgtaccttttcacgatgcgctcggcttggtctttgcgtctgtcgtccataccctctcacctctttctcaaatcaggttgccgacgttgaacgccgtcttcgtttcgatctccgcaaatgcgttggcgcttgcatcgaccatatccttgaactttccgtctgggaaattctcaagctgcgtaagatacacctcgttccactcgccatacatgatgtcgaagttgccggcctgccattgggcggccataggctcggctctggcctctttactgccgctttcagcgacggccgtaacgtcgaagccagacaggaacttgatgtaggactcggcctgctctttaccggcttggccggggtctttaggcaggcggacgcggacgcgcttgtacgccgcacggtctgcctgagcagtcagctttatcgtctttcgcacatcggaggcgttcatctgcttgttgatgacgtccgcgatgacgtatcggccgttcttccgcttgcccatcaggacgccagcggtataggccgggtcgccgttctcggtcttctcggttgccgccaagtcccagcagcgaacccactggatgacgtcctgcggcatgatggtcaggatctcgccaagctgcgttctcttgaagaacaggccggcggcggccctgatcttccagttgcctttgaggagtcgctcgcgctggatgaccgacagtgccttcaggttggacaggtagccggggtcgatacgcagcagctcttggttgtcgtacacggaagacatgatgaacgtcaccgacttcggttcgttcttctcttccggtgtggtcaaattgaagcgttcccagagttcctctctggtgtccgcccagtaaacgacctcgtcgcgccgaatcatgtagcgaatgaggccagaccgctcagggatgggatagccggtgtcttggtcgatccaccatgcgatgaacttcgccacccagctatcagcatcagggttgcaggtcgctcgaacgaacggcttgacgccgcaggtcgaacggttacgggacagcatatagaagaaaatctcctcgctgaaatgcgtcagctcgtcgaagccaatctcgcagatctgagcgccctgccagttgtccagctcctccgaacgctcgatgtgcgcgaaggacacctttgaaacctcgttgccgtccttatcccgaaacgaccacgtgccgtcggagattttacgctgtgccccattgataccgtggtacatcttctgggcttcatcccacagaccgccttgggcgaaaatctgcttgtagttcttcctgaagatcgtgcagccgaagcccttgacattcttgtatctcaatgccgacagcagcaggccgtaggtcttgccgccaccggccgctccgccgtagatgcagatgtccgcaggggttgcaagaaacttctcttgcgggccgaactgcggcttcagcacacggacttttctctcaggactcttgctggtcgccatcgtccctgccgtttgcggggagatagatcagaacatcttcggaatcatcgccggcggagagggcgacttcctgccgctgcgcccactgggtacgcttgcggttgttcagccaatacataattgccatagtgtctggcactatgttcttcgtcgtgttcttgatgcggacgggcttcgggttgccatccttatccatgtcgattgttttctcggtgtcggtaatctggtagcccaaagccctttgataaagtgccttctcgaccttagagtcggcgatgttctttcctcgctcgactgcgtcgttcaggctctcatgctcctgcttccagcgaataaaggtgcgcgtcgagatgccgaaagcctcggcaatctcgtcgttcgtggctcccttgattgccagcgaccaagcccaatcgtcgtggtattcgggattgtacttgctgagggccggcatatcacatcactcactttcctgccagatattcggtggcaagcatttcgatcaactgccagcggttcttgctcgtgatggcaccgtccttctcggccttcttgatggccttcgtaatggtagctgcagactccgcagggatggcgttgctgccgaaaatcttcgtcagatacgtccactcctcgtcgtccttgaagccgacctcgtccatcttctccgtgacgctctcgatcatggagtggatggcggcgccgacgttgcggatgtcggagaacttctggtagcgggccagcgcctcgatgaactgcttgcactgctcgtagggcgcgacaccgataatctcaggtgccgaggactcaagattcttcaccagcgcatccatgtccttcacctgatgcggcaggaacgaaaacgtgatgttcttgaagtcgaaatgcaccgccggggacagcagcttatcgtactgctccagaggctcctccatgatgtccttgccgatgaagctctccagcatatcatccacgtcgtcgagcatcttgcagatctcacgcaggatggacgggtcatcgaaaccgctgatggcgttgtgggccaactgcttcgacgcgatcttggagcgggacaggccgctcacgtcgatgatggcgataatctccttcatgccggcggcgcgggcgctcttgatgcggtggtggccggagataatctccagaacgccgtctttctccaccagcaggggcaggctctcaagctggccgcggttcttgatgttcgcggtgagctgatcctgcatttccttcctcatgatgcgggcgttgatgtcctgctcccgcaccttatcaagctggactttggcgataatcaggccagtgcccatgtcgtaaatcttctcgtagctcattgctgtgctctcttctgctgccattgtttctccctcctcagccattcggccaacgtagccttctcgtcacggccagccacaagggcggcctcataggtcagcttgtacccgttcttcgcgtcctcctgccggttgaccagcttcatgatgccgcgaacctctttgttctcggcgtacttcgtgagcatggctgtccgcatcttcgtgaccttctcttggtcgatgtcgtcgagcagcgtgtccacgaagctctggttctgggccagcatatagcagagacggccgaggcggtacagcttgtgcggcgccttcatgacgtaccacacaaagatggagtccgcagccatcttcgagatgccgaagaccgcggccacatagccgtcgatcaggacagcgcggttgtaggtcgcctgcgagcctacgaagttgtgcgtccagagcatccggtaatactgcgcgttggcgccggcgatctggataattcggatgtcgctctcctctgtgatctcatagtcgagcgggagcatactgcatttcagaggctccagcttgccctcctgcgggcgcttgattttcttccctttggcaagggccaccgcttcctcttccctgttcgtcgtgatgtacgagttcaggtcggcgcgtgtcccagagcgggcaaagatggtgtggccgacggcctcacctgcccgtttctcctgatagcacaggagcagagcgggagcgtccatcatcatgtcgtagagctgctggtggccggtctccgggtcgaacataccataaggcggctctttccatgtcatcttgccctgcgtgtcgtagaacttctcatagccggcgaaatacgtcggcgggttcgccacgatgatcgtatgtgggtcatccttcacctcacggagatggtcccacatatccagcgggcggtagctcataccgccgagcaggctcttcgtggcctcaagctgtcggcggatgctctcgatgtgctcttcacgcctgtcgtgcaggtcgcgcaggatgttgtggaaatactcgttccctgcgctcttcgatgtccgcagatagatttgcgcgtacagagctacggccgggtctaacagctcttcatcggagaagccctgcgcgtggatctgcagcggttcgagagactggcccgtgatggcgtagcccatcaccgaggtcatcatgtttacgtcgctggtttcgatctgctcaggcttgaaccccgactggactgccagattcgccatagcgaatgtaccggcgcatggctctacgaaccgcgtgtacccggaacgccgagcggtcttaatgagctcaatcaaaaacttctgctcaacaccgttcaggcacccgaggaacatcgctccggggtccataaaaaacgccattgtactgacctcctatcggtttcgagaacacgaaaaagaggcggcggccttgcggccgtcacctctcagacgtggtcttcacttacatctcgtcgatcagcttatcgacgatgtccagacaggtcatcgctgtcctgcccttctcattccagtattccgcagcgccacccctaacgctgtcggctaccgtctttatcatcagacacgggacgctgttgcggtcacaggtcagcaggatcgccgctgcttccatgtcgcacacatccgcgccgaactctttgttgagccagagcttctcctccgccttgcccatgaacttatcgccagaggcgcaacacacatgacgcaggttcgggaacactcggcttgctatctccatgagccgttcatcggtctggagccgccggtcttggtactccatgtatcgaccaacaggcacaccgtccacgtcggataggtcgtactgccaatgcaccacgcagtcaacgaggcaaggctcgtcggccatcaggtcttctctgcagcctcccactacgccgtaattaagaaccgcagcgacttcgtagcggtcgataaggtattgtgttgcggcggccgcgaaaatctcacctgcgccgctatacagggcgtagacttggcttttggcggtttgataaagcactgtgccgtagccgtcgttcaaatcgtagccttcgccgtatttctggcgcatggtctcttcctcgactgctacgatcagtccgatcttcctcatggagtcactcctcgatgcaagagaaaaggcagccggttctccgactgcctttctcgtattctggaccgggctccagcttgcgaggctggaacgcctgccgggtaggcaggaatgatgcactttcaccaagcccggatatggaccgggaatccgcttacggggcggaaactctcgacaggatgccgagcgtgatacctttcactattcccggatgttgtcccgatggtcggggcctatggcacggacggttgggaatcgaacccaccacacgcggttttggagaccgtgtcgccaccttgggacattcgcccgtatatggaccggaaccctacttgcgaggtaggaactccctcaaggatagagggcgtgatgctctttcaccagttccgggtatctgatgtgcgggcggggatttgtcaccccgcatagcgcaggcagcgtacaacgtgctttcttcccgtccgaggtagctacttaaccccaataggtctgcgttctgttgtgcccttctgcgccgcatacccttgctgcgtctacctattccgccaccgcacatcaccggcctgccggttacagcaggctcagttgctcaactttctcttcaggcggttttgccgccttaggctgcttcaaagcgtcagcctcaggcatctcctcgatgacctcgccggtgtgggccagccaccactccgcaaacaacgtgcggtggcaccagttctcaggcttacggatgtcctcaaagcagagcagaaccagcttcttgtcctcctcctgagccttggcgtcaagccgctggacgatgccgataatcttatcgacgccgatcttatccagcttcttgaaatactcggccttgtactcctcatagcccagcttcagcatatcgtaccgcggagccagcgcgtagcactgttcacggatctcgtacccagttgaaaatctgggcttgccgacgctgatgccgacgggataatacccatcgtttcggagttccttgttgctataccgacctgtcataattgccatgtgattgcctcctgaatatctttactttattgtaccatacggcctacctaaagcaaggttttacggtgtcgctacgaatttttgtgaccttgttcggatgcctcgcgcctcgctgcggcaggctgtgaaatccctttttaggggtgacacatacccagccgatggccctccgcctcaccgtgccgccgtcgtggcgttttcgatgcaggtttcaggccctcaggcgccgtgtggttacgatactcaggggttctcaccaagcagcgccttgctgggtctgttgcgcttacttgatggcttcgagcagcttctccgcggtgtccgtcttctcccaagtacgctcctcgccgatgacgttgccgaagtggccgtaggcggaagtgttcttgtagacgggcttgcgcaggtcaagccagttgataatgcctctgggggtcagatcgtagacggcctcgatggcgtcgcagatcttattctcggcgtacttgccggtgccgtaggtatcgacgcggatgctcacgggatgcgcaacaccgatggcgtaggcaagctgaacctgacacttgtcagcgatgccagcggccacgatgttctttgcaatgtggcgggctgcatacgctgcggagcggtcaaccttggtggggtctttaccggagaaggcgccgccaccgtgcgcggcatagccgccgtaggtgtccacgatgatcttgcgcccggtgaggcccgagtctgcggcagggccgcccttgacgaagcgacccgtgggattgacgaacagggcgtaggtgtcaacgtccatattgggctggtaggtcagcagctcgtcgaggacgggcttgatgacgtgctccttcagaggctcctccagatcctcgggtgcgacgcactcctcatgctgggtagagatgacgacggtgtcaacccgtaccgggttgcccccctcgtcatactccaccgtcacctgtgtctttccatcggggaggatgtgagggatcgtgccatcctttctcttcttcatcagcaggtatgccatcttattcgccagcgtgataggcaggggcatcagatccggtgtctcgttacaggcgtagccgaacatcattccctgatcccccgctccgccgactccatcgttggttcccattgcgatgtcggggctctgctcgtcgatggctaccatcaccgcgcaggtgttgccgtcaaatcccgccttggggctgtcatagccgatgtccttcaggacgccgcgggcgataccggcaaagtcgatgtagtgctccgtgctgatctcgcccatgaccagcaccatgccggtcgtgcagcaggtctcgcaggccacacggccattcgggtcgtgcttcatgacctcgtcgagcaccgcgtcggagatgcggtcgcacactttatcgggatggccttccgtgaccgattccgaagtgaagagtatcttgctcattcgttgaacctccttgttgtctttccgtttcgtctggatttcttgtccccctcggactctccagattttctatgctacacgataatacaggttgatggtgaacttcaatcccgttcgctccccatcaattcttgttactctctttttgtctcttttcctgtcttttactccccgatacaggtattcaaatgcgctggcggtgaacggtttcgccgtggaagcagcatccgcagtagacccagacgccatccttgaaggtgaacgtcataaacgtcgggcgccaacggccattctcgtctaccatgtggtcgtatgcctcgcccacctgcagatacccgctcgacatggatgcgggcgggacgcagtcgcggaagtcattgacgatctgctcgtccacggtgtctccgggctgtgccgctttgcagaagtccccagcagccgcccaaacctcctgagtgatatgcttgctcatgtcttatcctccttgatgtagttctccttgagccagtcgatccatccagagatacctccgcaggcgtccagcacgtcatccgcgtcatccacgatgctcgatccgtgccaatgccccttcgggtctttcacgaatgcctcgatccagctattgttctcaaatgccaccttgttctcagccgtttcgtctgcgttgagggcgtcccacagctccgcgtcgctcttgaaggtagtcctcagagtgtcagatgccgccatgttcatcgcgccggtgttctgcttgttcttatacaggaaatcgtggccgttcatgaagccgacgatctcgacgtctccatgtacctcgacggacacctcatagcccttgtatctcaggccaccgatatggccgccgtaccacacgcaatcgaggtggtcatcgtcaatgaaaatgctctcctcggtcagaagctccgcgccgaacgccttcgcgtcggcctgcatcttgcggtagcgccgctcgatcttcgttctgctcatgcctgcttctcctttgcaaaaatataggcgctcaccatttcagccgtaacgtccaaatccatgttacggagccacacatccgacatgaggtgcagcgttttgaactcttctgcgtcgatacgcaggcgttcatctgccatcgcaggggcgtcgcctctggaaatcatgcgctcccttctcactccttcgggcacccatatcccgatcaccgcaatgcccttgcttcccgcatagtggtttttcatgtattcgatgccagcggggtcaatgacgtacagaaggctgctgtcaatctccgactgtggcaccccgtagcggtagccgttgtagagcgtaaacgcgcacatcgggccagcagcatcaaactcctccggtgtcacgaagatgtgacccggctctccagcgtatcgaggcgggcgttcggtgtacgaccacacctctttgaagccgtaccactccgttattttgcgggcaacgctggatttgcctgagccagacgggccggccagcaggtagatatactttgactggttcattccgggtctcctcctatatgcccatgtcgaatacttcgtaatcctctatctcctcgatgtcgtacccgtcccctcggagcgaagtaagcacaaagtcaaagtattcatcttcactgtgcctccacttcatctctgcgttcccgaggctctgcgcgaacctgtggccgtcgtagtttctgacgcgatacaaagccgtgtcgaacacgccgtcatcatcgctgaaaagcagaatgattttcccaccagccgcgtctttgccctcgcagccctcgtactcggcttcgcaaggccagatttcagacccgaaccctctgtcctgctcccacctctcgaacagctccgtgatcggggttgaaatctggtcgctgtcctcgggatcgtcgtactgaaggctttgcagctcctccatcagctcatgcagagaatgcccgtggtcgatcatccactgcagttgaaacgtctcatagtcgctcatacttcaacctctcctttcttcggccagctcgggccgcagttgaaaacgaggtacaggtgctcaccgtagtcctcgatcctgtcgccagactcttcgagcccgtgcagatacgccgtgttcaccacgtcaacggcgagccgcagctttcttgtgacgatgtggaaatcgtacccgaccagaacgatcacctgatggatgtcatcaaggaacccgttcaggtcaaactccacgctggtcacaccgtcgatgctcagtaggtcgcgttcaagtgatgcgcacttctcggtgatgccgtactgttcggcgatccgtgtagtctcgccgttcatcgaaccgcccctttcacgtagtacaggccagcctccgcgaccgtggtatcgtcgaagcagtcggtcatcgcactactgaccttgcggatcatctccgggtcaaggccagcacgttccattgccatgatggcgtaacccttgcaggcgtcgttgttccacggcccctcaatcatctgggccagtatgccaactctaccggccgcatagccctccgctcggatgcgctccaccgttctctcaggcagtgtgatgcgcatggatttgcagtcgaagtcctcgtcgtccgggctgcagtcgagcaggtcagcgagtttcgcttcgatggcggcgtcatccacctcttcttcgatgtctgtcgcctcgaaagcgtggtaggtttcgtaggtatcgtggcttctctcgaagccgtagtgcagttcaatttcgtatgccatattcactcctccttgccgtactgcttgaatgtgctcaggtcgtatgccccagccacgccgttgcattcgatctcgcggtcgatgaaatcctgatccgtcaggctgatggttccgtcgttactcaggtctgccgccttttcttcggcatcttcacgtccgtcagcccaaataatcacgcttctggacagcgtttctcggactgtcacgctgtacgggcgcagaccgtccaccggcgcgtccgtggactccatccagccattcgcagcgtccacgaacttggccgtcagttcctccgctgtcacatggagcgtcggccggtcggcggtaggctcaacgcctacccactcaaaccacggatggtccgcctcggtgacgttgccaaaacggtcatcaggcaaaccgacctgcaatgggatgaagtaaacgccttcatcgaggctgtcctcgatggccttttcctgttcctcgctcacgctgccggcaatcacgacttcgtggcgaaccttgtagttgtctgcgtcacggtaaaggtagctgatcttggtgttgacccgtgccagccagccaagcgggtcgttcaccgcttcgtcgagtgacgcatacggatttctggcgttggcgttttcattgaagccgttgaccacgtgcaacatggcctcctcaatgctccgatagcgcctgccgatggtttccgccgttcccttgtggtgcccagcaaccccgaatgtgaacggctggtagctgtcgtcctccttgtgaatgccgaggctccagtgcttgtactcgaagagctcgttgtgccctgcctcccagccgccagcctccttgagccactgcagtatcagttcttttgtcaggcgtctgctcatgcttcttcctcctcgtctaaattgtagtgatggataacggtcggctcgtcatgcccaatgtcatatacggttgcccgcaagccccttccaaatcgttagatttggtgggggttattgaccaacaattttcgtgacccattccgccttgatgagcgggatatgcgttactggcagctcaaacatcttaccgttcggcttcagcaaatcccgtttggcaagcggcaaaatcatcgaatctccgaagccaaaaataaggtcgctgaaacggtagaaatctactgtgagtgttggaatctcctccggcacattcaccaccagcatttctctgctggggaaatatgccccggacggcataccggcctttcggacagcttcgcgaagcgcattaaggttctcaaaggcgtagccaaagataagccccagagcacttgtcgcgttgtgctcgttaaacgtatccaatagataccgatacgcttttgcattcgggtctgccagaggatgcttcgaccaatcaggaacgacgtcctttccgcatttgattgcggataccctgctggcaggctgcgctgtataaaacctcatgcctgctctcctgcgccaaacagaaatgtctcctgctggcggtagtaggccagcgcttctgagaagcggcttgccgtaaacgtcttcgtctgctgggtgtgcgccttcttgttccagacattgacggtcagctcgatatactccagctcgtagttgatgttcaggttcatactgatgttgaagtcctgctcgtcccggactttcagaatcatgtcttctccctcctcaatacttacacttgatgccgaagtcattctcgatacaactctggatgagctggcccattcgccacacctgatccgatacgagcgtgtagccgccgatgccccagtgccacgagaagctcttgccgttctttcggaacaacgtgcaggtcacatctcttcctttcgtcaggcgcatcatcacttcatcgccattgaagcagccgagcgagatcaggttcatttcctgcccgtctttcaccttcagtaccacgcaggcatcgttgtttgacaacagttccaccatgtccttcagtttcatttcgcattcctccttatctcttatgtacggcatagaccgtcatccctgcgctgttcttcacaacgcgatcctcgaactcctgctccgacatcggttcaagatagaagcgaaccgtatccagattcccgtcgctgtcgtattccttcgcgccgtacagaacgtggtctgcaccggtctctttcagaatcttgatggcttcagcctcaaacttctgaagctcctgcccgacatctcggagcggcatctgcccaaacgcgaccatcccgttcgccgtccaatgtctccaccgaacccagccgccatttttcatatcgcatatctccttccgctcaggacatcgaccaccgtagttccggcgccgaaagccgatctcatttcgtgcatctcttcgccgctgggctgccgactggcgtaacctttcagagcctcccgcacctctgctccgtaggtggcgcgagtggcggacacgttcacgcagtcaggagcgaccagctcaaccttttcgagcatatcgtcagccagcgcacggccaatgctgttgcgggcaacgccgtcggcgtcaatggtaatcttgcacgagtccaagtcggacttcacgcgctcaagttccttctgggcttcggtctgccagaactggccgagctttccgctgagttccatctgaaatctggtcatcgttatttcctcctactggttatctcaaattatccatctggttatcttatgagtatattatactgcgttacctacctaagtcaatagatttacgttaatttttctatattatttccacaatcataaatcattccgttaatgttatcggcaggcagaaaaagagcaggccgcaaagcctgctctcggtttcctattcagtttcgtcgtagtcgtcggggttccacatcaggccgttatcttcgatgtactgggccatgctcaataaagctctgccgtggagtttgaacacccgcttgcggtacatatcctcccgttccaacagatcctcctcgtccccgtacagcagatccaccacatcgccccagcttgccccgtcgaggtatcggcttcggatgacagcccgctcgtcggagtgtttcagccgacggatgattttctcgaagaacatcctctcccgccgtctgtgttccagcgtcgctcggatgtcttcctcaaggtcgaacttctgctgcatcaagtctgagatgcggtcgttggatgggctcggcgattttggcatatccgtgagggcttgggctcccacgcctaccagcttcgtctccaaccgctccagcctctcggactgattttcgatttcgcgcctcagatcacggaggtctatcagccgttgcttgacggcctcgacgtcgtagtgtttttcctcgttcatagagttcggaagccccgttcacctcactttcgctctggccccgcgaggctcacgcctgcttgacccactcatacctcttctcgaagggctcaaagtccttctctccgaggatgcccttcaagttcatgtccatcttgatctgccaatagtcctgctcgtcacccttctccagagcgccgtggtacttgtcgaagaccttgccccacgcctccaccacgcggcggatgcgcttctcgcccaagacatcctttcccatgacggccgggtcgttcaaggtgagaatgagcgtatcggtcataaactggatgtacgtctctttctcagcctgccggtagacgttgaccgtgttccgctgccgttgcaggtatccgttctttcccatgactatccctccttatgacgatgctttgaagttgtagatgggcttgataatctccagcacgtcgcaggtcgggccgatgcagcctatgatttccttcatgtccttgtaggcaaacggtgcctcgtcgatggtgtcgtagctgatacaggagctatgcacgttccgcatcgtctcgcggtaggctccaatggaaatcgactctcgggctttgctgcgggacatcaggcggccagctccatgcggcgctgactggttccaatcttcattgcccttgccaacgcagatcagagatccgtcgcgcatattcatcggaataatcaggcgctcgcccttcttggcagatacggcgcctttccgcaggatcatgctctcgtggtcaatgtagttgtgcacggtcgtaaactgctcctgcgggacgatgtgcatagctttcaggatggcctttgcgatggcctgacggttggcctccgcgtaacgctggatgatttccatgtcgctcaggtagtcatccatcagctcgccggtcaggtacgcgaggtcgggtactccgaagtcgctgtgctgctttctcagttcttccagcgcaccggcgatttccttctgtcggccagcagccttgtactcggcgacgacacggctgatttcctcgctggtgggcttcgtcatggcctccatcgctctgtgctgatgccagttcgccacctcaaggccgagctttcggctgccggtgtggatcaccagccagaggccgccgctcttatccttgtcaacctcgatgaagtgattgccaccgccgagcgtcccgatgctgaggagcgcacggctgttgtcgatgccgacgcatttcaggccgctcaggtcgaaccactccttcgggtagttgtgagtacagaaaccggccggcacattccagcggatggccttgtccagctcgtcaaggtcgagcctcacccgccccagcttgacggccagcataccgcagccgatgtccacgcccacgaggttcgggcagacgcggtcgtgaatggtcatcgtcgttccgatagtacacccagcgccggcgtgaacgtcgggcatgatccgtaccttggagccgtcactcacgggatggcgggacagcttctcgatctgctccgtcgcttcctgctcgatggtcttcgcaaaaatcttcacatcattggtcatcgtcttttcctttcactcgctccacggaaactctgtgataatgtcgtccccccaaatgggcttcatgctgtccttcatgaagaccggcttgccgagcgccttggcctgctcgaccacgccctcgatccactcgcgcttcgggacgaccttatccttgcggttgcccgtctccgcgccgaggatgaaccagtccatcgactccataatgtccttcttgggattgcccagaggccccaaaatcggctcgatgctggcgaaggtgtggtgttcgtccgaccagaacatcggcacatcgcgctcggtcgtcgttgagccgtaccagaactcgtcgccggcaggcagcaggcccgcctcgtacagtcggatgtaacgcgctgggtttttggtgaggaacaggtatctgtgcccggaggcagccttgcaggcgtcgaacaccttcttgatccactcgtcaggcacccaatccccgaacaggtcagccatcgaacagacgaaaattgtcttgccgaaccccttcgtcagcgggtcattgaggcggtactcatggaacgtaggcgtgaagccgaaggggtacgccgcatttcgggcgacgccgtccttgctggtaacagtcagccgttccttcaggtacaccacattctcgtcggtctctccgccggccgcacagtcgcagcctttgaagcgattcgccgtcgatctggcgtaacagtacgggcatggatggtagcagccgctcacggggttccatgtgctgtcgcaccactcgatcttactcttttccattcgatgctctcctatcagaacggcagttcgccggcgtcgtcatcgggaatctcggaaaaatctccgctgggctgctggtagctgttgtcgtagctgccaccgtagcttccgcctccagaccgattaccgccgtccttgttgctgtccccgaaatagacattgtcagccacaacctccgcgctgcggcggttattgccctccttgtccttccagtcgcggatctggagccggccttccacgacggccatgcgccccttcgtgaaatacttgctcacgaactcggcggtgtttctccacgcgaccacgtcgatgaagtccgtttctttctcgccgccctgccccttgaagtcgcggtcaacggccagcgcaaacgaggtcacggccgtcccgcttccggtgcgcctcagttcggggtcacgggtcaatctgcccatcaagattatcttgttcagcattctcggtttcttcctttcgtttcagtctgtatagcttgcacaggtgcttatccagcaggacgcctctcgtgaggtggtgcttcttctggaacgtcagccaccctatcacgtggacttcggaatggtgctccctgcaaagcgggagcacctccattccctcgtgaatgatctcctcacggtcgcggcccgcgccgacatgatcgacgtggtgcaggtcgcacggtttcccgcagatgcagcacttcttgctcaccaagcaagcgtacacatagtcctgaacatcatccacgaaatcgagcagagagaagctgcacggaatgtcccagtcgaggatgaaccgcaccaaaaaccgctggaacgcacacacaaggctcataggggcgttgctcagggagaacatctggtcagccgtctcctgcaggtcttctgcgatgaacttcagcttcatgtactccttggtcgggtcgagccccatgccggtgtagttcgagatctcccgaatgagcttgtagcaggtgcgcctctgcttgtcggacagcgggcggctgtcgatcatctggatattgcactccttatactcgcgcttcaggagcatcggccagtcgtcatatctggccttgatggtcacgatgccgtgcttgtcgatgtcaacgatcctgcctcgcactatgtcgattgggcttttcatgcctgccctcctctctgctccaatcgcggttcgttacgcctcgggttcgtcgtactcgtagccgttgggctcgttctcgtcagcaggctcctcggtgacaggctcttcctctgcggcagcgtcggtcgcatccgtctcctcggtcggctcctcttcgcccgaagccgcttcctcggcggcatcctccatgccgacatggggagagtcgatgtcgaacagaacctcgctgcaatcctcacactcaatggagatgttcacgatctcgtcatcgccatagccgacgcacacgacggcgtgaccgacatgggggctcagcttctcagcggagcagtagaacgggttctcggggctggtcgcagaggacaggacgaccttgttgccctgcgtacggacggtgtagttgcccatcgcctcggtgacgttcatcgtttcgccgatgaactggcggagccagccgaatggcttggacggatcatgcgcggggtcgatggtttcctcctcaaactcgccagcagcgtcaggagtggcatcctctgcgtctgcgtgtgcaacttcctccccgttgattacgttgctctctgaggccgcaggaagccctctgggcccttcgtcaacgacgtcatattgggtgttggcgaagtcagcagaatcgccgtcaccatcaaagagtgtggtctggccgttgtcgatgtcgcggtagaaatactgtccactggccttatcgaagaccagctcgaagttaccggagaagctgccgctcttcttctccttgcgctggatgacgtaggcgacggtgtggtcgaacttcggcttcgtcacctctctggtctgatggccgcctgccacggtgtagtcgggggccgagtcatcggtgagggtgattttgaccttaatgttgatctcgccggtgttctgctccgtctcaatcatgccagccagcacgtcgcggagcgtggtatcgaagtcagcgcacaggctgttgaaagcctcgcctctcagggacagggaatagtccttgctcatggtattttcctccttcattttgtcgtgtcgcggatgtacttgtttcggcaggcttcacagcaaaagtcgtgccactcgccatccaccttcgtcgtaatccatccgagccgctcccgcagctctttccggtgggccttcgagtcgatgtcctcgctatcgaacgggaacgaaacgtccttgccgcagcagtcgcacgagtacacggcttcgccttcccaatagccgctaaactccagatctctcattcgtcgatcccgtcctcacccatgaagaccgagccggcccgcatcgctctgcgctggatctcctccagcagcgtcgccgtgctgatgccgtcaaggctgggcaggccattgccgccgcagcagtcgcattcgccgcagcaatcttcctcaacctcgtcgtccaaagagaccaagaggtcagagttaagaagcaaagcggggcggatgccgaacgagccggatgcgtcgccgtagttgtagtcgcccctggtgtagacgtcccacacgtagttggtgctgttggtgtacggggagcggagccaccgacacgcccaaggcgtgacgagccagtaccagtcatcctcgttcagcgggatcaactccttgaactggccgtactgccagagcgtcaggggcgccgccttgaccgtgatggtgccgtagctcttgctacggtcggtgcagctcagatccacctcaaacgggagaatggccgcggcctcctccgatgtgcgaggcagggcctccacccacttgtcgatgcgctccttcaaggtggagcgggtgtagtcgttgcggttctccgcatcgtccttgtcgttgaacgggcaggactccttgctctgagccagcaggacgaacgtggagccgtcgcgctgttccataacaacgaacttttcaccggcgaagttgaaaatgcggccggggctgagttttgcgagtttcttcatgattgcctcctattctgcttcctgaattgtcacgacaaccctcgggtcgtcgctgaagaactttcttacctgtgcgtctacaatctgggcgtcatcgtgataggcgatgtcgttcagggagtcgcacacgattttgccgatgttgtcgaagtcgggcttcttcatcggtctgattttccgctcgcgcatgagctgcgctctctttttgctgacacttttggggatgccgtagtacgccgtgatgcgcacatcaagcggtgtgtccttggggaacttgaagtcgttgcattgacggcggtattcgagcctgacgaggttctcatagctgaccgtcttctccggtgtgtagggctgaacaaacgcgccagcgtttcggaatcgcggcctgcctttgcccgccggttctccaaggacggaaaacttcagcttcattttggtatctccgccccctccaccatcgtctcgccaatccaatacttgacgaggtattcgttgcttctcccgtccttcttctgcttcacgggctggacggaatacccgtttcggaacaggatcgaggcgaccgtcacgcggtcggcttcactcccgattttgaggtagaagacctctttactccccgccatgttcaggctcctcgctgagtttgaactgcgggccccacgttgcaacgatgtggtggctctcctgatcgacgaacgcgagcttcccgtcgtaaatcgtcatgttcagcttgtacttgatacaggctctctcgacgtcagcgataagatgctgtacccgctgcttcatttccatttggcttctcctttcagtcaatatcgaacagcttctccatctccgtgaaccgccggctggcttccttcttccgccaactcgggccggtgaactgcatcgagtagcaagtctcgaagatgcggtcgtaaatgcggctgtaccgtctgtcctcttcttccttcatctcgtcgatggtcaggtttgtggtcaggagcatcgggagcttccgccgataccggctgtcgatgatgttgtaaatcttctcaagcgcatagtcggtgttgcgctcggctcctaaatcgtcgaagatgaccagcttcgcactgttcatccgagcgatgatgtcgctttcccgttcctcgccgtcctgaatgagtttcagcagctccacaagagatgtcatcatcacggggatgcctcggttcagcaggtggtttgcgatgcaggccgccgcaaagctcttgcccgtgccaacacttccccagaaaatcaacccctgatttttggacaccatctcgtcgaacgcctcggcgtatcggcggcacagcttcagatttctggcgttgtatttcgtgacctgaaagctgtcgaaggacgcctcacggaacttttcgtccacgaggcttgcctttttcagacgggcaacacgctccatgtcctttttgttctgctctgcctgcttctcggcggcctccttgtctcggtcgcacttgcatgagcgggtggccttgaacgtcatcttgttctcggggttgccctccatcggagcggacaccgtcaccatcccctgcctcggctcaccgcacttcccgcacatgagcattccgtcatcgtcgaaccaatcgccggggcggatctcctgccgttcaagcccgcgggcggcaatacggggcaaaatggtctgcgggtcaaatccttgcatttgtcattcctccccgtattccgcaaacggatttttgttgtcgggcaccgcgtcctcgggcggcttggccttcttcttatccggcagatagtcaaggaacggtcggctgtcgctcaggaacgtcttcgggtgcttgatgtactgcttctcggtgccgagcctcttgcactgggtcgcatagttccgagcggccatcagcagctcctccggggagaagccctcatggatgcgggcctgatacttcttgaaggcgttgcctttctcagcctttttcgggtatgcgtcccagaactcgtcgaaggtcggcgtgtactttggcgttgccggttccgcagggggcttcggcggttcaggaggctcggtcggcgctttttcggctgcgggagtctctcccccgtcgattttaagctgcttttcctcgccgtccgcgggaccgtccgtgtgaccgtccttcgccgcatccgctttttcctcgttttgggccgccgctttgctgttccgccgactctcgcgcttgcgggcagcgtcgcgctctcgggcatccttggccttttgccattgggcttgccaagtctcccagtcgtggatgcagattccgcgaggcgaccagtcgagccagccgctatcgaagagtgcatccacgattttcttcggatcgagcacacaacctgcgccgacgccgtacaggtatcgctcgatgtcctctttttctgcatacagtatgagcccgtccctctcagcgttcgtaagcccccagaaccacaagaagttcaggatgcccgtcgcctcgaactttgagcaaccgagctgcttatacagattccgcagcttcggcccgtcgatactttcgtgtacgctgatccatgccattttctcacctgcctgtctgtatgacggctctgccgtcggatcgcatcactctttaccggggaaatcgggctggtcgctggcgggaacggtatcgctggcttcctgcggagcttcgggttcaggtttcttctcctgagccatttccatgaccttttcggtgatgcggtgatacacagacgtaggcaggccctccgtggactcgtagccctcggcggccagcagggatttcaggatgccgttcgcttcctgtccaaaggcgctcgtcgccatcttgaaaagcgtctggcgctgatcctgcgtgataggttcgtccttttcggcttcggtcacttcgccggtagcaggatcgaccaccagagcgaagccatccgtcggaagctcgcccatgtcgaggacttcctcctgactgtaaatgcccataatcatatcggggcagttcatgcggccgaagaacgaagcggcgcggtactggatcatcacgtcgggcatggtcttccacttgctgccgtttttgctcgtccagccttcgtcgttcgccatattcatcgtgattttcgggccgtagaccttgtggccggagtaatcctccgcccaagcgcggcagctcaggccgccgtcggctttgtcgcggccgaactcgaactgcagctcagtcttgtaccggcgactgctgttaatcatggcgatgatccactggctcgaccacgcagggcgcccgttgacgatgtagaggttctgcatcaccatcatcggactggtgttgatgcgagatgccatctcaatagcgatcatgcagttgccgacgtttccgtggtactccttggggactaccgtagacgacgcaaggcactgggccatgcgcagagccgtattgaagctcgcgccgtcagcgaagacgctcaaggctcccccgccggccgttttctgagccacagccccagcgggcgccgtgctcagtttgttttcgttgctcatgttgacctcctgttattctccggttttaccgggtgctgacgctggtggtgtaggtttcgcggaacttgataccggggatctcgacctggcccttggacatcttaatcaggcggagcaccgcagccttatcgaccggccgcagctcaatgccaatgagagacacgggaaccttagaccagtcgcactcggactcgcagatttcccacgtcttgctctgggagatgcccttgaccttgggcgtctgatgctggacgccaccggcgatggacaccccttccatcatctcggcttcggccatagcgtactctgcgccaacagcgtcaccgttagcctcggcttcggcagcttcattcaggtggcggtcgatctcggcctgagccagtcggcgcatggcctcctcctgctcacggcgcttgtgctcctgctccgcgctgtactcgttcaccttggtcttgacgatcttctccgccttttccagaggctcaatcatttcctttctgtggttcagaacctcgtcgtagctcttcttggcggacacgcggagaggctcccaatagtccttgacctgcttctgggcctgcttgatctgcttcaggaacaggccagcgccctcgaaatccgctccagaggcgacgacgaccgcttcggcccgctgctcaatcaagctgacttctttgccgagcttgctctcttcagcgttcatcacggtcacgttctcttctgcggtgtcaaggacaagggcattgcttccgatggtctttgcgtcgttcatactgacactccttttcatttatttgtaagactgttcatagtcgtacagacatttcagtgccccgactacgcggcatctggcggggtctttggccgggaactcacggaacgcccatttcccgtcctttttcagatgcaggatgtgctttctttgcggtgtgatgccgtgggaaataagtgcctgcgagtaggcttcaagctggacaccgcaggccatttccagcagcgtgtacgtcgtcttgaagtcgataagctccagcaggccgccaatctcgcagagcaggtcaatcgtcccgccgtagcgcatcagcttatggtagatgcgcacctcagagccgaagacccgcggtttatactgcttccaccactccatgaagccgttgaagtagccgcgatgctccgacggaatatcgtcgatgccgaacttgatccagttctcgatgctgttatgcaccgcagaacctttgatggcggcgttctcaagcgtccgcttgctgataccgccgtagcactggtctttcagcggctccatcagcttcgacacgctcgggatgatgtcgccgttcagccggtagatgtggctggcctcgtcgaacgtcagctctggcagttcaggaacctcaaccgtcatatccatctggaatgtcctcctcgctcgcggttctccattctcctcccagcttcggtatcaggacgcagagcggcaggtcttccaagcagtcctcgcaccacgcctcaccgtcgatgatgccgtactcgtcgccgggaataatcggctctccgcaggagcagcagtgcgtcaccggcgtcgggtctggcgcgtttgggcagccgctcaggcaagggctgtgcatacagatgtcgcacataagtttctcctcccaatcgcattgattctctcgcgcatcacataatcttccagctcgtttctgaacagcagaggcacatactcctcgtccttgccgttcaggtctgccttgcggacggtgtgctgcatgatggcgaccatgtcatccacatcgaaccagaagccggtctcgttctggacgtccacgatgatgtttcccagctcctcggtgttcagcttcgccgtgtcgatcatgccagcacctccgcccatgcgtccgcgtattccatcaccgtgcggctgtacgacgtggtcgtgtagcctttgctgaagacgtgctcccgagctccgccctcgccgtagttgtaacaaatcaaggctttgtgccagtccccgtacttcccatacaggtcgctcaggatgaacacaccagagcggatattctggtacgggtcggtcagatccgtgaccccgattttctcagacagccattcggaattgatgctgttgatctgcatatagccgtagcagcttccgttcgaggctgtggccgtgaacgagctttcggcctgaatgacgcccagagccacgttctgagggacgccgtattcttcgcagaccgcaatcagatggcactgcaggtcgaagtccagagggatctcctcgtgcagataaccttgctccagcagagcagcctcgattttctcgttctcgtcctcttcctcgacaggttccggttcctgaacaggctcggccgtcatctggacgggctgatatgtactgtcgtgctctgcgaccagcagaaccggctcagcttgcaacacgggcggctgtggcgtgggttcgggtgccgtttcggctgccccccctgtcagggctacgatgctggccgtggtcagcgccagcacggccgctgtggtcgccagcttgattcgcaagatgcggtggcgtcttcttctccgttccattcgggtcatgatgctttgtcctccttcgttttctcaggtgtcgcgcagaacggggccagatccaacggtttcatccgccgaatagcctccgcaagctcctgtgggcttttgatgccatactcttccgcgagtatagccatcagactactttgatccatgggcatcaccatcttcgttcagagccatctctccgatggtcttcagctcgctcacggtctttgccagatcgtcgaggtaggccaaaacctcttgaagcgccggtttctcgtcttcggtgattttcccgtcagccgcgatgtcaaggagcgtgtccttgacatctccgagcttttcggtcttcaggctcttcagcagcttgaccgtcacgcggtcaatgcctaccacttcatcggagagcgaatgcctgcatccaatcgggcactcgttcaagcagtagtggttcagcagccacggggcgttgtacctgtcagccatgagcaccgccttatcgaccggcatgaactttgtgttccccagctctgcatctgccagcgaagataccgacattccgagttgctcagccgcgctctcacggctacatagcctgtcatcatattcagcagccttttttctggcttgataccacggatttcccgccgctttcgtagcgtcacgtcccattttctctgagcctccaatcgcctataattaccgtagtggcaagataaattatccaagcggctaatcatcgggcaaaaaaatatacaccgacgccgatgatggcctcgattaaccagttggcaacttgccgtcgaagaaaaagtcgttcacctgcgcattgttcagcgtgagcaggctggcgacctccgggacttcatccaaggtaaactctacttcgcctctctcttttctcccataggagacttccgtgaggccgagcttctctgccatgtacttctgcgtaaatccaagccttgcgcgggctcccttgattt

SEQ ID NO: 13513 - DNA, 3140 bp, Unknown
  gut microbiota DNA sequence
tactgctccttgttccattggatatacagcttccgcgcggggatttcattttcgatgggcagcaccttcacattgtagggggtcccgcccaggggcctgggaacgatagcgacgccgtgattggcggccaccatgccgtacataatgacgtcctgggctgtctccatggtaatcttgggctggatgcccaggctccggaacagctcgtcggtgacggagcgcagctggcagttgttgtcgaaagagatgaagggctccccgtccagctcccgcaggtccaccgactcccgctgagccagccggtggctctccgggaccagcaggacgatctggtgctcaccgatgagggccccttccacccgggggtcgtcgattttagtacagaagagcaggtcgatctccccggccagcagcttgtcccgcagctgcatgaaggtggcctcctggttgaactggaggcgcacccccacccggttggtctcggataaatagcgcacgatcagctcaggcgcgaactccgccagggagggaaagcaggccattaccaccgttccgctgtttgggttgatataatcctggagtcgggccactccggtgtccagcaggttcagggcctgggaaacataggggaggaacagctccccatatttggtcagtttgatgttgcgtccctttcgaacaaaaaattccacattcagctcgtcctccagctcctgaatggagtggctcaggttggactgactgacatacagcttttccgccgcccgggtgtagtgctccagctcggcgatggtcttgaaatattgcagctgccgtaaattcatacggcgctccccctttctgtcccggatcttaatatattgattcaattatgccataattcgatgaaaaaatcaaatatatttttcagttcgggacagaaaaagcatatcttatcggtctgacccggcctgcgcctgctttgccagcttgcgggtctccagggtgctgaggatgacatcagcggagatgagcaccaatcccaccaggaaggagggggtgaaggtctcgttcagcagcagcatgcccagcagggcagagaacatgggctggagagggtaaaagagggagcaggtgctggcaggcagctcggccagactggccgtccaggtgtactgggccagcccggagcccaccagccccagatagagcaccaccaggatgttggcggagctcaggccggtgccccctgcctgcaccgcggccgccacccccgtggggatgtggaaaatcagactgatgaccatgccgtaggctgtgaccagaatgggaggatacttggcggtgagctggcgcatgaagacagaggccacgctccaggtgaccactgccgccagcaccaccaggatgcccgccatctccccctggccggtggcgccggtggtgatgacgaaggtgcccaccagtgccagcaccagacacagcaccttggtgggggtgatcttttccttcaggtggagggcagcgaagatggtgacccccactggtgtcaccgagttgaccagggaggccatagaggccccggtgagggagatccccagctggatgaggaagatagtgaggaaatagcccatgacccccaccccggcaaagtatttccagtccgcccggtcgatcttcacgccgaagtgcttccgggccatgagcatcaggggaaatgaggccacaaaacaccgcaggcagcccagcaggggggcgggcacatcgtcagagatcagcttcccccccacgtacacgctcccccagaagaagaaggtgacaaacagaagcagaaatgcccggcttttcttcagcagctccatagaaacgctcctctccaaaacacagcagtctttcagcggatcagctctggctggacgcatgggaccgcctccggaatatttctctgccgggagcagacccacggggccacccaaaggaagaaacggaccggcgccgctggggcgccggcccgtttgaaattcatgggtacgcgcttgtccgcagctggggatcaggccccggcaacagcggccagctcgtcctgcaggatggtacccagaccgtcgacctcgccgtcgatcttggtgtacaggtcctgcacgccctgcagattcaggatctcgtcatagaactcgggagcgtactccaccatctccatgccgccggcagccagagtgtccttgctgctcttatccagctcggtcagagcgggacgcagctcagcaatggcttcctccacggcctgagtcagggcatcctgatacagggggtccaggctgttgaacttgtcattgttgatgatgatctggttcaggtacaggatgtggttggtgaagttcagatacttctggacctcctggaagttggaggtcatgcaggtatcagcggcgttctcctgagcgtcgatggtgccgttctgcagggagatgtacacctcaggccaggccagaggagtgggggcagcgcccagagcagaccagaaagccatgtggttctggttctccatggtgcggatctgcaggcccttgaacgcatccagagtgtccagcttcacattggaagtggtcagacggtaagtggcgttctgcaggtagcccaggatcttcatgttcttctcttcatacttgggggcaatggccttcaggaactcgctgtcatcgccgttcagcacctggtcgatggtgtcgccgtcatactgagcgaagaccatgggcagatcgaacacggccacggcgggcacgaaggagacggtgggagcggtctgcagcaccacatagtccagggtgccgtccagcatctgctgctggatatccatgtcgccgcccatctcgctgttgggatagtactcaacggtcagctggccgccagtgatggcgtccaccttctcggcaaccagctcacccagctgctgggcagcggcgcccacgccggcggagtcagcgccgcgcaggaccacggggtccaggctggcgtagtcagaaccggtgctagcagcgggggtgctggtagcaggggtggagctggcggcgggggtgctggtgttgccgccgccgcaggcggccaggcccagagtcatggcgccagccaggacaagagctgcaaatttcttcatgtttgtt

SEQ ID NO: 13514 - DNA, 22656 bp, Unknown
  gut microbiota DNA sequence
ccctgacgggagaccgcggcgccctgcacagttggaagggggatcaggatgaggaaatcgggatcagaagatgccctgagccatcatggcgtcggccacgcgctggaagcccacgatattggcgccggccaccaggtcatagcccaggccgtagcgctcggcggccgccacagaggagtgatagatgttcgccatgatctgatgcatcttggcgtccacttcctcggcggtccagtacagccgctcggcgttctgggccatctccagggcggacacggccacgccgcaggcgttgacggccttggagggggcgatcaccatgtgcttctgctccttcaggaactccagagcgtcgttggtggtgggcatgttggcaacttcgatgtagtacttgatgccgctggcggcgatcttcttggcggagtccatgttgacatcgttctgggtggcgcagggcatcatgatgtccaccttgtcggcgcccaggccccagggcttctccccggcatggaactcacagccgaacttgtcggcgtaatcctggaccttgtcgcggccagaggcgcgcatctccagcagatagttgatcttttcgtcggtgacagcgccatcgggatcgtagatgtagccgtcggggccagcgatcgcgaccaccttgccgcccagctcggcagtcttcttcaccacgccccagcctacgttgccgaagccggagatggccagccgcttgccctcgatagactcgccctcgtgcttgaggacctccaccagatagtacacggcaccaaagccggtggcctccgcgcgcatgatggagccgccggtggtcacggccttgccggacagagcgccgaattcggaggcgcccaccagacggcggtactggccatacatatagccgatctcacggccgccgcagcccaggtcgccggcggggcagtcgatgtcctggccgatgtggcggtacagctcggtcatgtaggcctggcagaaacgcatgacctcggcgtcgctcttgccgcggggatcaaagtcagagccgcccttggcgccgccgatgggcaggccggtcaaggcatccttgtacacctgctcaaagcccaggaacttgatgatggacaggttgacggagggatggaaccgcaggccgcccttgtaggggcccagggcgccgttgaactggacgcggtagccgcggttgacctgatagtggccctggtcatccagccaggtgacacggaactcgatggtccgctcgggctcgatcatccgctccagaagggatgccttctcatactcgggatgggcgtcgatcacgggggccagggaggtcaggacctcctccacggtctgcaggaactcaggctcgccggcattcttctgacggcactcttccagaactcggtcgatatacttgctcattgtactcattcctcctaattgatatatgtgtgtgtttggtcaaaatctgacggattcccttcatttcagggaaggggctccgttttgccctcttcatgtatagcataacacaattccagcagagcgcaagcacgttttttgtggatgttaccacaacaaaaaaactgtggtatgagaaaaacaaaacatcccatttaaaaaatcgatcgatttccccaaaaaaggccgcggcctcataagatggccgcggcagcggagaaaatgcaggattttagtcaaatgccagtccaagataggcggtgcgggaccagtcccaggcctcctcccgatccggtgagagccacttgagcatcccaaactgccagccgccggacgctgccggacgctgggccaaagggccccgcaccagaaagcgctcccccgggaccatccggggcagatggggcagaacggtccgcagcttcgtgcccagcagctccttatacaccaccagacccgccccgtccccttcggcgcaggcgcagacagggccgtcctccgtctcccctgcaaacaggcctccgccggacagggcgcagcatccggcctgataggccagcgcctcctccggataggcgatgtgggggcagtctgccaagatcttctcccgcacggccccgtattccgccggagagacggggcgcagggggttgtcccaggcgggggcagggagctcacctgggtccaggtcctcctggaacagggtaaagcactctcggaagccgttggccccgaagaagttgtggagggagggctccgccgggacggtggtcaccgcagggatggccagaccgcggaagtattcgtccgcccccgccagcagccggcccgccagcccccggccccgggccgccgggtcggtggccacggcatagaggtacgccgcccggaagcggccctccccggggaggaccagctgagtatcgaaccaggcggtcatggactggaccacgccgtcctcctccagcaggagcatccgctccggcttgtaataggtctggtaaaagttgtccacataggccccgtcatccccgaaggccaactgccagagctcacgctcccgggcggcatcgcctggggtcccaagacgtatctgcgtcatgccgtatcctcctctttttcagacagacataccgcctgccctctctcagtgaggggcaggcggccctgtgctcctcagtatccggggtacacgtcgcttttacgaggcatgatgacggcacaggccagatagacccagaaggcagtggagaaggtgacaaaggtggcgatcacccagcctacccgcaccagagtggggtcgatgtcaaagtactccgcgatgccgccgcacacgccgcacaccatcttatagggcccctctgtcttatacagcttctttttctccatgacatgcttcactccatttccatgagatcgccgaaacgttctttctgtggataggatactacacagaacctgaaaaaatcatagggaacggattaaaaatgctttaattttttccaccgccccgctccagataccacagccgccgggccagcagggtagtggagaggacgaaaaagatctccagcgcgctgctgatgatccccaccatcgcgaacagcaccagggagagcagcaccgtcactcccagccacttcatacagtcccaatagcgctgccggtcctgccgcgctttctggagcaggagcagaaacagggacagcaccagcaggcagctggccgtaaaggcgcatatcacatgcagatccgcgatcttcggcagctcatccggggtatagggcagcaccactgccgacagcagcagcaggaagcctcccaacaggcagagccggggccacagcggcctgggcagcgcggccatcaccggcagcaggacgcacagcagatagacccccaccagcatcccccacaggaaaaagccgtgccgctggtcccgggcggcggcgatcacggaaaaattcgtagtgaaccagcgggtgtcatgggtaaagagcagggtgtagagcgggatcagaaaacaggcgaacagatccagcagacgcgcccgccagtccggccgcagccactttctcacccgttccctcccacttcctccagctcccccgcctcgttgaagcggacggcccggatctcgttgccggtgttcttgcggatgtcgtccagccggatgctctcagtgatggtggacaccagggtataggccgccccgcggcggcgggcccggcccgtccggccgatgcggtggatataatactcgttctcgtcgggcacgtcgtagttgaacaccgcgtccacatcgtcgatatccagtccccgggcggccacatcggtggccaccagcacccgcagctccccgtttcggaagcgctggagggtcttctcccgcactcgctgctggatgtccccgtggatgccctcgcaggagatgtcccgcatcttcagcagaccggtgaggcggtcggtcatgttcttggtattgcagaaggcgatgacccggtcatacccccccagctccatcaggcgtaccatggtgtccaccttccggttccgttccacctccaggcggtactggaggatatccggcttgttctcctggtcagcgcgcaccgtgatctctaccgggtcccgctggtacacccaggagatatccatcacttcccgggaaatggtggcggagaacatgcccaggttcttccgtttgggcatcaggtccaggatgcgggtcacatcccggacaaagcccatgtccagcatgcggtcggcctcgtccagcaccaccgtctccaccttgtccagccggacggtgcgccgcttcacatggtccatcaggcgccctggggtggccaccacgatctggggggcctttttcagctggaggatctgtttgtcgatgggctgcccgccgtagagacacacggtgcgcaccccctccttgaacgcgcacaggtcccgcagctcgtcccggatctggatggccagctcccgggtgggggccagcaccaggccggtgacctgggtcccctggggatcggcgtgctcgaccatagggatgccgaaggcaaaggtcttgcccgttccggtgggggccttcgcgatcacgtccttccactccatgaagtaggggatggcccccgcctggaccggggttgcctggacatagccctttttgtcgatggcccgcatcagctccggggacaggttcaggtccgcgtaccggaccttgtcgttgacgatctcgccgttgatttccatatctctgttcatccttttccgcatgtctggtccgatccaaggccccctctcaccgcccgcggtgctccgcggaccagacacgccctttccccggcgcggcctcaaatcagctggggaggtctgccctccccccaaaagcccgctcctgtgcgggaatttgtatcattttatcatagtctgccccaagaagcaagcgaagcgccgcccctgcggccctttccagccgattttccccatttcgctgttgtgctcccggccgcgaggtgctaaaataaaacaaaaactcccgcttttcgggagctgtccaaaggaggaccaccatgccctacgctgtgctcgccgccgcccttgtcgccttggaccagctggtgaaatatctggtcagccacaacatccccctggggggccatgtccccttcctcccccacctggtggagctgacttactttcaaaataccggcgccgctttctccatgctggaggagcacacctggctgctcaccctgatctccgccgtcatgtccgtggtgctgggcgtggcggtgtggaagaagttctttgcccaccccttcggccgctgcgccctcaccctggtcctggcaggcgcggtgggcaatctgatcgaccgggctctccagggctatgtagtggacatgttcaacgtcctttttatggacttcgccatcttcaatgtggccgatatctgcgtggtggtgggcgggatcgccgcctgcgtctattatgtctttttctatgagaagctggaaggaaaggggaccctccatgagcacgctgacgcggaccgctgaccgtcccggcgagcgggcggacgccttcctggcccgggtggtgcctgacctgacccgttccgccgcccagcggctgctggaggccggcgcggttcggctggcaggcaggccggtgcggaaaaactaccgcaccgcccccggagacgtgctggaggtggacatccccgccccccagccggtagacctggtcccccaggatatccccctggacatcgtgtacgaggacggggacgtgatcgtggtcaacaagccggtggggatggtggtacaccccgcccccggccattcggacggcacgctggtcaatgccctgctatatcactgtggaaataccctctctgggatcaacggcaccctgcgccccggcatcgtccaccgcatcgaccgggacaccagcggcctgatcatcgccgcgaagaacgaccgggcccacctgtccctggccgcccagctccaggaccacagcctgtcccgggtctatgaggcggtggcggtgggcgggctgcgggaggatcgcggcaccgtggacgcccccatcggccgacaccctgtggaccggaagaggatggccgtcgaccggcagaacggccgggaggcggtgacccactggcgggtgctggcgcgctacccgggcttcacccatgtggagtgccgcctggagacgggacggacccaccagatccgggtccacctggcctccatcggccaccctctgctgggcgatgtggtctacggcagcaaaaagccggtgcccggcctggccggccagtgcctgcacgcccggcggctgcggttcacccatccctccactggacagcttgtggagctggagtgtcccctccccggctggttccaggatgtgctggaccggctctcccgcctgaattgactgcgcctccccggtccttcagccagggaggcgtttttttcacccgctccccatgggcggcataggatagagggctgtaaaacatggtggaaacgggggtgccgggcttggagcagacgggatgggacgccctgcggggccagctgaacaccctggacacctctctgctgttcctggctctcctcaccggggccaccgccctctcatgggccatcctctcccggcagcgcggagcccttctctccctcctctctggagaggacatcccggagccggacctgattccggcccggctggccgtctccgccctggtggttggctccctgagctacttttttctgctgtccctggagactctctgcaccgctcgatcccagggggcggcagcctgtgcctcggccgggcgcaatgcccgtgcctccctgctggtgctggcggctgctctgatccggctgtatgacctcaacatcctccgatgcaccgctcccgccctggagtcagaagagctccctgcctagcggaccgccgcaatagaaaacaccgcgcctcctcggctctgggccggagggcgcggtgttctcgtttcagtcaatgacagtgccgttccagtagtactccgcctggggcagatccagatcctcctcggtcagcggctggtcgtaggggttgaccagctcgttcagggtgggcaggatgtcctccgcctggaagacaaagcagtatttgtatccccggaccacgccctcgccccggcccttcagagtgccctgggtgatgccggtatccaggtccactcccactgcctggctggcgaagtagagcatgtcggtggtggacaggtctgtcttgacatactcctggaagatctccacgaactcctgcaccttggtcagggagttccaggagaccactttcttggccagggccaccagcacctggcgctgcatctccgcccggcccacgtcggtgtaaccgctcccgtcgttgttgtggcggaagcggaccacctccatggcctgctgaccgttcaggtggtgctggcccttggtgtagtggatgtgcaggtcctgataggggtcgtcatagttcatctcctccgggatatagacgtccaccccctccagctcgtccaccagggccacgaatcccttcaggtccacatagatgtagtagtcgatggggatgccgaaggtctgctcgatctcctccttcagcacatccacccccgcccccgcgtaggctccgttgatcttggggtcctttctccagtcccggtttaccgccgtatcccggggtatggagatcatccccaccttctggttggctacatcgtagctgaccacgatgatggtgtcggtgttggcgctctccctgtcccggcccagaaggacgaaattgtacacatcctcccgccgctgccgtcctgcgggctgctcctgttccaccggctccgccgcctggctcccgctgccggcggggggggccgggtcgggctcctgggggatctcaggcggccggaccgtcaggttccacaccgcgtacacccccacgatcacggcggataaagccaccagtattccgtagagcaccattccgatccgaaaaagcgggctgcgctttcggcgctttcctccccgctgtgtctgtatgcgtgccagagttgttcccctctttcctgtttcggcaatatacctgtccagtataaccagttcgcctcgattcggcaagagggactttttctcttttaaaaattttaaaaattggttcctcctttcaggagatcatctccgcccccacgacatagctccagcggtccccctcctgccgggcggtgcagtcatagaaacagtaggcccccaggctggagcggtatttctggagcgaaaaggtgtgtctcccgtccgcctcgatgctgtcctccacggtgagcagcagcccggcggggaactcctcaaagccgctgtccgggtccgcccggatcagaccctcctccgccagctcctccagggtgccccggcgggtgtccagcccaagttcggcacctaaggtctccatgaccccctcctgctcccgctccgtcagaccggtgcagccggtccagtcaaaggccagcagctccgcgccgctgttcaggcccggatcagtctcccacaggtccctcaaggcccggcagtacagctccgccaggccagtcaggggctccggccgggtctggggtcgggtgcggaacacgtagctggctgagcccacatcaccccactgggcgcagatctcatacacgcagtccccgtcccccgggagcagaacggtcccgttctccgcctccagggtctccgcctggtcctccccctcctgggtccgccccacatattcagcgggccagcggcggagggccacctgtgtgggctggacctcgaaggccagcgtcagcgccggggcgagggaggccactcctcccccctctgtttgtcccgcccccgcggggatgccggtatagaggaccgggtattcctgactgtccagggggtggaggccgcaggcaatccaggtctccccctccccatccggtcccgctttgctccagctggcgttccccgaccaggacagggtgatctggtcccagccgcaggatacggtgagcgccggcggctccgccagctcttccagggccttctccccatcggagaggacctgggtcccggtggtctcccccgctccgctgctctctccccccgccggggcccgctctgaagcgcaggccggagcgcaggcagccagcgccagcatcaacaccagcgccgccggaacgatccattttttcatctctctccgctcctttcttacggctccgcctccagcagatggtccagcgtcagggcgtctccttccccctgcagaacggcggagaggaagctgtcactccatcgcgcggcctcctcccagggctcctccgccccggcagacgcccggctctcagtctccaggacgacccacatgtctccggtcagaaactggctgtgacacagcccctctgtcctgccgtctccgtccaggtcccctgtcagtcgccaggcagtgacctctgtcccgttcacctccgtcactgtcccgccggggacggcctcccctggggagggcaggtctcccggagccagggtgagggcgaaagaggtctgcgcctcctccccgactccgcccccccgtaccgtgacccggagcagggcccccgaagcgtcatacagggcctctccccccagctggccgcagtcccagcccagctcccgaagcagatcctcccgaaagagggcggtcagctcctctggagtcagcgcccggctccgtgtctccgctgccggggcctggtctgtcaaggctgcccccaggccctcctccccccggtacagcgtcccaatgtccgggtagttcaccgcccacacagggggcgagagctgcttttcatcctcctccatggcctcggagctcccctggtgcgcggccccgctctgggcggactgcatcccggcactgtccatgctgtaagcctgggcggccccatccggctgccggacgccgccggcccaggccagtcctgctgccagcacacagcaggcagccagtattccccaccggtaccggtggggagcccgccccgcaggggcgggctccccaccctccgccagcgctgtcagccgggcgtggagcgacggggataccccctgccggtccatatactttttgtattgattcattttgtttctccttctagcaatcgcctgagccgggaccgggcccgggagagccgggaccggacggtcccctccgcctgtcctgtgagccgggcgatctctccggtggagagtccctcgtagtaaaacagatggatgacagcccggtcagccggcgggagggaaaagatctcctccagctcctgccgctcctccggctctggggcggggagggactcccacagggggacgcttcgccgccgccaggcggcccgcagccggtcccggcacccgttcaccagcacccgcatcagccaggcgggaggactgtccaactccgccggagccttttccagaaattttagaaaggtgtcctgcaccgcgtcctccgcctcctgggcgtccccaaggatggccagcgccgcccggtacaggcggtcctcattctctttcaccagcgtctcccaatccaccggccggttggatatctgagacatcccctgctcccccctttctatcccttcagacggataagcccgcccttttgctgcacggaacggaaaattttctgcctgctgtctctgctcctttagacgtccgcgctcccaaaaagttccggtccccctgccgggggcaaaaaaacgggggcccggtctcccggccccccgtccctgttccgctctcctcacccctgtccggacgccccgccctccaggcgctccaccggcctggcgtatttgaagcaccgcccggggtcatagtaaaaatacatcagccgcccgggggtgagatccaggcggcagccagccccagtgtagtcgaagccggccatggcggcctcgatccgctcttccacgacacggttctctccctcgtagtcaaagggcccatgctcgaacaccacgtactccccctccggcacgtccatcagccgcagctggggcggcaccccgcccccgtaatccgaggggagcctcaccccccagcactcggtccgggggatcccccagccgcacagacggcctttcgggtcgttccggtaggccatgatctggccgctcccgcagttggcctcgctcccgccgctgtcgtccagctttcccttgatgctgtccagcaggccgcagacggtgtcgtagtcctgccccgggatctcggcctgtctctgccagaagtcccagtagccgttgctctcccggtcctccagatacaggaatttgtgggcagggatggtgacaaagtagatcttcaccccctggcaggagccgatcatgcctatctcctccgtaccgaaaaagtaccggtcaatggggcgcagcttggtacgcagcaccacgggcctggggttgcgtcggtactcccccgggggcacgccataggctcgccggaaggcccgggtgaacgcctcttgggaggaaaagccatacgccagcgcaatgtccagcaggcttttctcgctgtcccgcacctccttcagggcaaaggccagcctcctgccccgcagataatcccgaagccgcatgcccgagatctccccgaactttcgggtggtataagattctgagtagcccagcctgcgggacagggcctgcagggtcagcgcctcgctgtcctgctgccggatacaccggtctatctcgtccacgatgctctggatctgccgctcccactgatacatttccaccgctccttccattaatgtgtcttcccccttatgataccccatttcctccgccgccgcttgatcccagctgctcagttccccttcccagatataaaaattccccgccggtcagaaggccggcagggagcgcacttacaggggcaggatccaggtggcgaagaagaaatagatcagcagggagagtgcgtccacaatggtggtgatgaagggggaggccatcaccgccgggtcgatgcccagcttctccgccgccatgggcagagtgcagcccactaccttggcgcacagcacggtaaagaccagggtcaggcagaccaccagggccaccaggggggtgacctccgggttgtgcatcagccaccggtctaccaccatcatcttgacgaagttggcggcagccaggcacacgccgcacagcaccgccacacggatctctttccacaccacggccaccaggtcggagaagtcgatctcatccagggacagggcgcggatcaccgccaccgacgactgggagccggagttcccgccggtgcccgagagcatggggatgaaggaggtgagcaccacacaggccgccagggcgctctcaaagctggtgatgatgatgccggtgaaggtggcggagagcatcagcagcatcagccaggggatgcgggagcgccaggtctccagcacgccggtcttcaggtagggcttatctgagggcaggatggccgccatcttctcgaagtcctcggtggtctcctcctcaatgacgtccatggcgtcgtcaaaggtgacgatacccaccagccggttgtcgccgtccaccaccgggatggcggacaggtcgtacttgttcagcagctgggccacgtcctccttgtcctcatgggtgttgaccgagaggacgttagtctccatgatgtcccggatgcgggtctcataggaggacagcaacatccgccgcaccgtgaccacccccagcagcacccggttctgggtgacatagcaggtgtagatggtctccttgtcgatgcccacgctgcggatgcgggcaaaggactcctccaccgtggcgtctgggtggagaaagacgaactccgtggtcatgatggagccggcggagtccttgggatagttcagcagctggttgatctggctgcgggtggaggcgtcggtgttgcgcaggatcctggagaccacgttggcaggcatgtcctcgatgatgtccaccgtgtcatccaggtacagctcgtccagcacctcccgcagctccctgtcgctgagggccccgatcagcttctcctggtcctcggtgttctccaggtaggtgaacacctccgccgccgtgtccttgggcagcaggcggaagaccaggatctcctgctccacgtccagctcgtccaggaactcggcgatgtccacctcgttcatctgggacagcagctccttcaggctgcggaacttccgctgttccaccagctccagcagcaggtccaggtcatagttttcgtgcatgcgttatttcccccttttgttcatcgcttggaacaattcgggacgcaaaaagaccacaagggcgacggacatctggaaaacggcaggctgggcggagccccgctttcggctcctgccgtctttcagatgcacttcgaccctgtggccgcacacgaaaggggcgggggcttcccatcccccgatctgttcagataccggcggcgcggcgggaccgcagcaggcccctgttctgcgccgccccccgttcgtgacagcggtcgtcccgatcccgatggcgacttcggccttccatgcgttcccacatcctctcccggcatatgctcagggggctcccccttctgcctgtatgggtccccgtccgctccgggcggtgacctgtatctatctctcagtatagcattcccatccgcattttttcaagtaaaatctttgctcatccggcctcctccgggctttttgccgcccaagtcacctccgtgccggtcttgacgatgttgatgtagctgtggcccacgcccagagccgctggctggccgtcctcccgatagaaggagagccggtcgctctctccctcccgctcccaagtgatgggccaggccaggccgtcccgcaccagcagtccgccgccgctgccggtagtgcgcaccttcagccggcccgcgctgtcccctgagagctgggacacatcggtatagagcaccagcacgtttttcaccgccacctgctctccggtgttcccgtccacatagggctcgccgtactcctccaccagatacagcccgctgtccgggtcgtattcaaacacgccggtcttataggtggagaaggggacggtgaggatctccgccgcctctcctccggcctccggaccctcctggaaggtccagcccacctggaacccctcctcgtggtccagacgcacccgctggtaggtgggcagcagctcctggatggtctcgctggaggtgagcactgagtgctccaggccggcgctccgccggcgctcctggtcccgccagaacagggtgccctcataggggccgttgacgcagtccagggcagtgacgccccggctcttgatgaactcatatgcctgggggctgcccccggcatggaggtagaccgcatcgtgtccataggccagggaggcatagtagtcccgggcggagcggaccgttccgatctctcccgcccccgccacatcttggaacacggccatcattcgggtgatgcccccctccgccaggatctcatagatcacatccgcctgggatacccccacctggggcagtgccttcttcaggttattgagcatgacagcgatgggccgccgggcgcccacatccacctcgcagccctcgccggtgagggggttggtgtagggcaggacgggctccggttcgggctccggctggggcgccaggaccgacaccgcgggctcgttggggccctcgggctcgctggcagcccccttcccgccgcaggcgggcagcgtcaggaccaggagcaggcaggtcagcaggcaggccaggcgtttggtgggcatctcagatctccccctcttgctttctttcctttatcatacccgccccaggggcgggtgtcaatctcatgcgtgtcgatggagggggaaaacttgccggcggggtccaaaatacacagcgggccgccaaaagggcggcccgctgtcaaactgggcgttcagttgaacttatagatcttccgagccagccggtagaggcccaccgacagccgccggccctgataacccgggaaattggtaaaggcggagacggcccggtacttcatcttgtgatagatcccggtgtccaccgtccgcagatattcccacagctgggtcttcttccccaggcactcgggggtgtcggcgatggtgaggaagatggaggagatggccatcatcatggccagataattgaacatgtaccgccccagcttgggctgctctgcagtgaggacccgcaggtcgtgggagtcgatcatctgataggtgacccgcagctgctggtccacccggcccaccatcaccgtctcgttgacggactggtccgcccggccgatgaagtagcggtacaggtccacatccagatagtagatgttccgcaccgagggcaggggctgatacacgaagatgttgtccacatagaaggtgtgcttgggcagctccagcccgcagtcccgcagcagctgggtacggtagatcaccgaatgcatcagcagatactgggaggggcggaagcgcccgatctgctcccagccgaatacccggttgcggggaaacacattgcggtagtgcatcacccgctgggtgttgtcctccacatgctcatagacgtagttgcacaccagcatatccaccagcttgccgtcccgcacgaactgacgcagcttgtccagggccttcttcagagcgggcacgtccacccagtcatcggagtccaccaccttgtagtagacgccccgggcgttccggataccctgattgactccctcgccgtggccgccgttctcctggtggatggcccggacgatatcggggtactgctgggcatagcggtcgcagatggcgggggtgtcgtctttggtggagccgtcgtccaccagaatgatctcgatgtcgtcgcccccctggagcagcgtctccacacagtggtccatataggccgccgagttgtagcaggggacggcaaaggtgatcagcttatccatacttctttctcctgtctgtcaggttttgggcgcggtccgggccgcagggtcagatcagctgtccggccagctccagcgcccgggccacgatggcgtccatgttgtagtatttatattccgccaggcggcccagcaggtgcaggttggggaaccgctctgccagcgcccggtatcgggcatacagtgcgttgttctccccattgatgatggcgtaatagggcgtctcctccggcgcgccggtgtaggcccgggagaactccttcacgatagtggtcctgccctccagctcctggcccgtcatgtgcttgaattcggtgatacgggtgtagggctggtccacggtgtagttcactgcgccccggctctggaaccaggtctggtccagggtctcgaaccggaagtccagggtgcggtagggcagggggccgaagcggcggccgaacagctcatccgccgcgccggtgtagaccaccggcccctggaacgggacgccgtccaccgtcagcacgtccccgtccagtcccaggcgggggatggcgtcctcccccagccggacagtaatgttggggtggtccagcatggcctcaaagaggggggtgtagcccttcaggggcatgccctgatactcgtcctggaaatagcggtcgtcctccgacaggaagacaggcacccgggcagtagtgttggggtcgatctgatccggggtctggccccactgcttcatggtgtagtggacgaacacgtgctcatagacgtagtcggccaccttggccagctccgggtcctgattctggcgcagctccaggatggtgaccttcttctctgcgccgtaggcggcgatcagcttctcccccagacgcttcccctcctcgggtccgaaagccttccgcagggaggtcaggttgaagggcaccggcatctgcatccggccgccgtccggggccggcaggtcggccaccacccggtgctggtagtcccgccaccgggtgaagcggcacagatagcggaataccgcctcgtcattggtgtggaaaatatgggggccgtactggtggatcagcacgcccgcctcatccagccggtcataggcgttgccgccgatgtggtcccggcgctccagcaccaggacccgctttccgccccgctcagccagctcccgggcacacaccgcgccggcatagcccgcacccaccaccagggcgtcaaaattcaattccaaggggtctcccacctttttctgttttttggggacaacgccccatgccgggacagtatatcataaatttccctgaaaggaaataaagaatcgattaaatgtggattgaaatggtgccggacaacgggcgcagatataaattttacgatgtaaaaatccttatttacaaatatcatatagattggtaatatatgggcagatccaatttataattggggatgatttgaaaaaatgaagcgatttgccgccggcctcgcacttttattccttgccatcacaggctgttctgcccaggaagcggcaagcagtacgccgcatatatatccccctctcatttatgtgaatgattgtctttatcatgacctaggacggttcagagccgtcacaaaactgccagacggatggatattatggggagaggtggagcagcgtgtgccccaaaccgaggaaattccagaagaaaatttcacatccaactctttagacccgggaactgagctgtttgccaatgaaacggatgacacgaagatctatgtaaaactggaggaaaagtattatcttttgtatgaacaggttatagaagaggatgcggactcctaatgccgcagcgagtcaatcactttaacagatcgctgcaacatatattgcagcgatcgtcctaaaagaggcgcggccctcctgctctccaggagggccgcgcctgtcttagtctgggggatcagtggaagggcaccatctccatgcgcacgaaatagccctgagggtggtggcacacggggcagctggcaggggccatggtggactccaccacatagccgcagttcagacacatccactgacaggtcacggaggagacgaacagctcctcccgctccagcagatcggcgaagcggccgaaccgctcgccgtggatgcgctcgatgcctgcaatggagtcgaacagcttggccaccagggggaagccctcctcgctggctgtcttggcgaagtgggcgtagtcgtgctcccactcctggaactcattgtgctgggccgcccgcaggtgggagagcaggtcgggatacaggtccaccggataggtaccgtccgcccggacggtctggccggacaggtccgccagctgccggtaaaactgcttggcgtgggtcagctcctggtctgcggtgaacagaaagacctgctggaccacgtacaggtttttctctctggccataccggcggcgatggtatagcggttccgggcctggctctcccccgcgaaggcccgcatcaggttgatgtgggtctcactgcgggcgaaggtctctgctttgtttggcatgagattacctccttttctgaactggttcccgttcagtatgcccgcgggggaaactccttattccagtatcaggaagagcctccctgtccgacatggcatctgccgcaccacctttctggggatgtttggcgagatatccccccgctgaggccgggccccgcgcccttttcccttgccttttccctcttttccaggtataataatgaaaatacacacgggtgttgacacccgcgggggcgggagcggagcatccccaccccgaagaggaggcatccccagggatgaaagaaaagacaaatctgaccatgctgtgcgacttctatgagctcaccatgggcaacgggtacttccagaccggactgggcgagcgcatctgctactttgacgtgttcttccgctcggtcccggaccagggaggctttgctatagcggcggggctggcccaggtcatcgagtatatccagaagctgcgctttgacgaggaggacatcgcctacctccgctccaagggctgctttgccgagcccttcctggactatctgcgccggttccgtttcaccggcgacatctgggccgtgccggagggcacccccatcttccccggggagcccatcctcaccgtgcgggccccggccatccaggcccagttcatcgagaccttcgtgctactgtgcctgaaccaccagagcctcatcgctaccaagtccaaccgcatcgtccgggcggcggagggccgtccggtggccgagttcggctcccgccgggcccagggggcggagggagccatcctgggcgcccgggcctcctacatcgctggctgctccgccaccgcctgcaccatggccgatcagcactacggctcccccgccaccggcaccatggcccactcctgggtgcagatgttccccgacgagtacaccgccttcaagacctactgccagctctaccccaacaatgccaccctgctggtggacacctacaatgtactgcgctccggcgtgcccaacgccatccgtgccttcaaggaggtgctggagcccctgggcgtcaccaagtgcggcatccggctggactccggcgacctgacctatctgtcccggaaagcacgggagatgctggacgaggccggcctcaccggctgcaagatcgtggcctccaacgccctggacgagtacatcatccgggatctgatccgccagggggcccgcatcgattccttcggggtgggcgagcggctcatcacctcccgctccgagcccgtcttcggcggcgtgtataagctgtccgccatcgaggatgaccaggggcacatcctccccaagatcaagatcagcgaaaaccccgccaagatcaccaccccccatttcaagaaggtgtaccgcatcttctcccgggacaccggcaaggcggaggccgacctgatctgcgtccacgacgaggagatcgacttcacccatcccctggagctctttgacccggccgccacctggaagcggaaggtgtacaccaacatcgaggcccgggagctgctggtccctatcttccggggaggcgagctggtctatcaggtgccggagctccagaccagccgggcctactgccagcggcaggtggacgccctgtgggatgaggtcaagcgctttgaaaaccctcacaattactacgtggacctgtcccagaagctgtgggacatcaagcagtccctgctcaccagccacgagatggcataagaggacccccggcggcgggagcttcccgccgccgggggttttttgcgccttttggggaatgaggagccccctgtcacctgccggtcacagacagctccaggcccggataggcggccgccgggtccgtggggacgccgttctccgccagctccaggtgcaggtgggggccggtggccctcccggtggcgcccacatagccgatgacctccccctgctccaccgtctcccccgtcactgccgtgatttgggagagctggccgtaggtggtggtccagccgcccccgtgggccaggatcacccggtcacccagtccgccctccccatcccagccctccgcttccaccgtgccggaggcggcggccagcaccggcgtcccctccggagccgggatgtcgatgccggtatggtctgtcctctgtccggtcacagggtggacccggccgccgaacagggcggacagggtatgatacccctccaccggccagagccagccgctcccggcgccctggggctgtgacgccagggccagcaggtccgcctccccgtcccaactgtcctcccctcggaccagagatatgtggagggtcagttgggtgtaatatccctctccctccgcctgccgcagcctgggctttattgggatctcataggagcgccccggttcccagacgcccggcgtgtccaggtggacgctcatggagacctggtccgccgccacgtagcggccggagatctgcaccctccagtcctctccctcctccagctcgggcagagtgaagcgcacctggctcccttcttcgttgagggccacgctctccgtcacctgctggagccgcgccgccgcctcctggggaaggtcctgggccccggcggcggaagagggcccccaggccaccgcgccgccgcagagcagtgcggcgcacaccacagccgccaccagagcggtccccttctttttttgtaaaaacaggttcatgatccttcctttcatctccgtgccccccagccgggtagtcagggccgcggtcacgccccctgacgatgcctgcaggagcacctgtccatagcggcggcggaagccgttgtcctgtccctccaccaccgcctcgtcacagtacaattccagatcccggcccgcctgtccggccatccgccacaccagggggttgaaccagtggaccgcgtttgccagtagcatgagtcccttgtaccacaggtccctccgccggatatggcagagctcatggcgcaggatcaggggcaggtccgcctccggcacctccggcggcagcacgatcaccgggcgcagcaggcccagggtcatgggggtgtccaccccggctcgcagcaccggcaccgtcccacccagggcctccagcgccgcctggtctcccgcccgcgcctggctgccctctaggatctttcttcgggcccgcaggtagcccccgccctccacgccgaggaagaggaccgcccccgccgcccagagccaggagagcgcctcggtcagttcggcggcgcctcccgctccgcctgcctgtggtccccggacggacgcgggacccgagatccccggaagggggacgagtgtttcctccgccgccggcgcagggaccacctgggacaaagcggtccccaccgggaccgggacgggcagggggatcagcaggcgcagggccagcaccagccacagcaggtaacagctccctgcccggtagcgcctgcggatggcgccgctcagccccagcagcgggagcaggagcagggaggtggcgagggagacccagaccacccgctccaccagcgccgtcatgtctcctctcccccgctcaggcggtccagcagtgcctggagctcctccagctccgccggttccaccctctttccgtcgtagagcgccgccgcgaaccgggagatggaactgccgtagagctttttcagaaagctctctccctcgctgcgttgatagtcctcccgggccaccattgctgtataggtgtttaccttaccagcttttttgcaggatagaaagcccttctcctccagccgcttcagataactgtgcagggcactggccgtgagcgggcgctccagcccctccagaatggctggggcggacactgggccccccgccccccataccaccagcataatgtccagctccgactccggcagatgacggttctcccccatctggttccctccttttttgcaaatgcagaatattctgtgtctatattctacatttgcagaaaatatttgtcaaggcatttttgcatttgcaaacaattttattttaaagcacggcggccggcagtcaacacatctca

SEQ ID NO: 13515 - DNA, 673 bp, Unknown
  gut microbiota DNA sequence
agcaaaggatttgaaaccattccgatttcggctgtgaaagcaatttcttgaaaggagcgtgtgggcgtatgagccgaattgttgatgaaccctactttacatacagtgcatacgacgccctcacctccggcattcaggtgaaatgccccaagtgtcatggcacgggcgtggtgaccgcggatgaggataatgcctatttccgctgcctgagctgcggccatcgggagacccgtgaccggacgatctaccgttatgatgtccataaccagtgcaaaaactgcggcaggtactaccgggtggatattgaagatacggcaaagcagcattttcccgtcctccatgtgacctgcccctattgcggaacaaccatgtcgggagaagttcataaaacagcggaggcgttttcatatattggcgaaatcaaggatggacgagaaccttacttcgacctggaactttggtttttgacctccttccagggtaagccagtctgggcactcaaccgggagcaccttgcctatctgatcggctatctcagcgccgacctgcgggaaaagccgatgggaagagcgaaaatgacccaggctgaccgtctccccaccttcatgaaaaccgcaaagaaccgggagcggatcgtgaagctgctgaggcaaatgcaggagaaatgaggatg

SEQ ID NO: 13516 - DNA, 15102 bp, Unknown
  gut microbiota DNA sequence
gtccccgccttattgctttttccccccgcttctgatatgataccttcaaaccaatatcaggaggggccgccatgagctacgccgatcaggtctttattcaaaactgtcaggacattctttcccggggagtgtgggacaccgaccgggaggtccgtccccgctgggaggacgggactcccgcccataccattaagctctttggggtggtcaaccggtatgacctgcgcagagaattccccattctcaccgtccgcaggcagtttttgaagtccgcggtggacgagcttctgtggatctggcagaagaagtccaacaacgtccacgacctgaacagccgcatctgggacgcctgggcggacgagtccggctccatcggcaaggcctacggctaccagctgggggtgaaacaccactacccccagggggacatggaccaggtagacaaggtgctgtgggacctgaagcacgaccccggctcccgccgcatcctcaccagcctctacaaccaccacgacctgagcgagatggccctctacccctgtgcctattccatgaccttcaacgtcagcgggaacaccctgaacggcattttgaaccagcgcagccaggacatgctcaccgccaacggctggaacgtgatgcagtacgccgttctgctccacatggtcgcccaggtctccgggctggaggccggcgaactggtccacgtcatcgccgacgcccatatctacgaccgccacgtggacgcggtgcgggagatcatcactcgccagccctatgacgccccccgattctccctggaccccgctgtcaccgatttctacgccttcaccccggacagcgtgcgcctggaggggtatcaggcccaccctgtgccgggaacgatcccggtggcggtctaagaggaggcgcacagtatggatctcattgtggcagtggaccagaactgggccatcgggaaggacggagagcagcttctctatctctcccaggacctgaagcgcttcaaggccctgaccctgggccacgcggtcattctgggccgcaggaccctctctacctttcccggcggacgccccctgaagggacggcgcaacctgatcctgtccaccacgccggacttcgccccggagggcggtgaggtctatccctccctggacgccctcctcgccgccgctccggcggatgcctttgtcatcggcggggagtccgtctaccgcgcccttttggaccggtgcggcaccgcctatgtcactaagatcctggcccagtaccccgcagaccggtacttcccggacctggatgccgaccctcgctgggagtcggtggaggagtcagaactcctggaggagaacggagtacgcttccggtatgtgacctaccggcgcaggcaggaggcatgacccatggaccgtgactatatctgggagggggagtacggccgccgttcccacctgatcccggtgttccagcagctgctgcgggaacaggacgcctcctcgctccagatgctctccctgttcgtcaacaacaatccttacaatctggaatttttcatcgcagtgagctacgaccgccccaaggaggagcatctggaccggatgttccgtcttctggaggacgctggactgcggcagcggaaggacctgaccgcgctgaatatcatgcgggccatggcggaccggcgcttcaactctgcctctctgctggatgaggacagtgttcccaccattatggggcacctctttttcttcccggagatccgggtcctggaggagaaaggctaccgtatgactccctttggacgggaacagatggtctttctcagccactcctctctggataagccggagatcgaagagatcatcccgctgctcaatgggatggatctgcccgtctggttcgacaaatacagcattgcccttggcgattccatcaccgacaaggtccaggagggcatccagcagtccagcatcgtgctcttctggatcacagagcactttctggattcccgctggtgtaaatttgagatgcgggccttcatcaagaagctgatcgaagaggacgtccgggtcatctccgttctggaccggggcatccagatctcccgcctgccgctctttctccaggacatcaagtgtctcatgcgggaagaacggaccatttatcaggtcgcccagcagatcgcctccgctctccggcccagctgagtgacttgaaaaatttagaaccactccatttgaaaagggggccggcgcgccatgcgccggcccccttttgtcgtctcaggtcagccattttccggcccctgggatcagccgcaggagccaggccatgggcagggacagggccagcagcaccagggccagcaggggaacaaagaacaccggctccaaggcggtgaccgtcagccccagccaccggaaaagcagcatccacagctggtggatcagataggcgccgaagacatagctgcccagggcatggaccgcccggcggcgggaccgctcctcactgatccccagcacatagcggaacagagcgcacagcgccgccgccgtcagggccaccccgggggcggtgtcgctgtaccacagctcccgcccgccgcccagcagcgcgtcgccacccagagtcaggaccagccccaggattcccagcaggtagagcagaaactccggcacccgcccgatggtatagtggcgcagataccaccccgccacataatagcccgcataccccagcaccagatggacctggagcctctccagcagggcacccaccaccccctccgggtggaaggccgtccaggccggcagcaggctggcaaagaggaagcacaggaggagaaaatacagcacctccccccggctggccgcggcggtgaaccggcgcagcaccgggtgtaccagatacaggccgagcagcgggtagaggacccgcaggtggaaatagacatcccccagggcggcggaccgcagggcacccaggatgccggaccagctcaccgccccgccgcccagcaggtgggccgccagggcgtacgccgcaccccagaagagcagcaggcagaaggccggcaggaccagccccgccagcgccccggtgagggatggctttccctcctccagggcagccatcccccaggccatgaacagggccggcaccgcccagcaggtgagtccctcgtagatgacgagcacctgccgcgccccggcggagaccgcctccccctggccctctcgggccaggagcagcaggatggcggcaaagacggtgaaggtcaggaaaaagccggaccagccggcgtttcgctctccccgggccatttatttcttctccggcacgatctcgatccaatagccgtccgggtcggcaatgaagtagatgcccatgcccgggttttcaaagcagacgcagcccatctccttgtgcttagcataaaagtcgtcgtactggtcggtgacgaaagccaggtggaactcgcactctcccaggtcgtagggcttgtcccggtccttcagccaggtcagctccagctggaactccgtcaggccgtcccccaggtagaccaatttgaacgagccgtcggaggcctccttctcccgcaccggctccaggcccagtgcctccttgtagaaggccaggctcttgtccagatccaggacgttgaaattgaagtggttgaatttgatcatgttcattcgctcctttccggtcgggacgaccggtgtctttttatcattatatcgggcacaagccgatttttcaacggaaaagtgtccaaagacaggcaagacctctgttttgtccccttgcggggcggggcaaatcgtggtatgatagtttatattttattccccgggtattaaggaggaatttccgtgtcatcggaccatatatggcccatcctgttttttgtcagcctggccggcaacctgatcctgctgttctaccgccctctgctgaggctgcttcgcaggggggaggaggtctcggaggacgagatcatggccatggtggaggagggcgaggagtccggcgccatcgagcgcaacgagaaggaactgatcgagaacgtcttcgagttcaacaacaccacagcggaggatgtgatgatccaccgcaccgatatggtgaccctctccctggatgacgatgaggagaccattctctccgccattcgggagtccggtctgtcccgcttcccggtctatcagggaaacgtagacgacatcgtgggcatcctctccacccgccagtatctgctcaacttccatgtggaacgtccccaggagctgcgggcgctgctgcgcccggcctacttcgtgccggagacggtgcgggctgacgtgctcttccgtgacatgcagagcaaaaagatccacatggccgtggtggtggatgagtatggcgggaccagcggactggtgaccctggaggacctgctggaggagctggtgggcaacatctatgacgagtttgacccccaggccgagcaggagatcatccagctggaggagaacctgtggcgggtctccggctccgctgacctggaggagctggccgaggccatggacttccagctgcccgaggacgaggaccgggactatgacaccctgggcgggctggtctttgctcagctggcggtcatcccggaggatgggagccgccccgtggtggaggccctgggcctgcgcatccgggtggaggagctgtgcgaccgccgggtggagtgggccctggtggaaaagcaggcgcccgctgctgccgcctgcgaatagagacgcgcttcaggactgccgcggccttgcctgcggcggtcctgttttttccgccccgggcgggcagatcagagagaaaggaacttcacccatgacaaaggcgatctttttcgatgtagacggcacgctggtcagcttcaagacccatcagatctccccagccgtccgccaggccctccaggccctgcgggagcgggggatcaagctgttcctgtccactgggcggcacctcgccatgctcgatccggtgcgacaggtctttgacttcgacggctatgtgaccctcagcggccagtactgcacggcccagggacaggtgctgcggagcactcccatgccccctgaggcggtggaggagctggtggccgccgcctggaccgacgccttctcctgcatcttcctggagggagaggagatctatatcaactgcatcaacgagatgacccggcagttcatccgggatctgtccatccctatgccgctccagcgccctgcggactacgcccggggccgggaggtctatcaggcggtgaccttcctgacccgggagcgggagcatctgctgctggaccgggcccctcacctgaagaccacccggtggcaccccaatttcctggacgtgatcccgcccagcgggggcaaggaccgggggatggacgcgcttctggactacttccgcatcccggtggaggacgctatggctttcggagacggggaaaacgacctgtccatgctgctccacgcgggcatcggggtggccatggggagcgcccacgaggagatgaagcggcaggtggactgggtcaccggaacagcagacgaggacggcgtggtccaggcgctggcccatttcggcctgatttgagggcggcgagagattgtactggaactttcgacaaaaaaggtgtacaataaaactgaaaaatcggcatataaaaaggaggacactggtatgaagctgagtttcttcggcgcggcccacgctgtcacggggagctgccactgtctggaagtcaacggcaggaagatcctcatcgactgcggcttgcagcagggccgggacgagcacgacgacaacgccctggacttcgcccccggccagatcgattactgcctggtcacccacgcccacatcgaccactccggccggctgccactgctggtcaaggaggggttccaggggcagatcatcaccacccgtctcaccgcccagctcctgtccatcatgctgcgggactcggcccatatccaggagagcgacgcccagtggcagaaccagaagggcaagcgggccggccgtgacgcagtggagcctctctacactgtggctgacgcggaggccgccctccagcagctctatcccgtggagtacggccaggtgctggatctgtgcgagggggtccgggtccgcttcaccgatgcgggccacctgctgggctcctctgaggtggagctgtggctcaccgagggggatgtggagcggaagatcgtcttctccggcgacctgggcaacatcgaccagcccatcatccgtgacccttcctttgtggaggaggcggactatgtggttatggagtccacctatggcgaccggaaccatgagccgccggagagctacaccgagtctctggcccagctcatcgacgaggtgttcgccaagggtgggaacatcgtgatcccctccttcgcggtgggccgcacccaggagctgctctacttcctccgggagatcaaggaccgtgggctggtgaagagcgcccccaacttcaccgtgtgcgtggacagcccgctggctgcggaggccacccgggtgtactccggcgacctccacggctatctggacgaggaggccattgcggtgctccaggggggagatgacctgttcaccttccctggcctgaccctgacccagtccacggaggagtccaaggcactgaatatggacccgtcccccaagatcatcatctccgcctccggcatgtgcgacgccggccgcatccgtcaccacctgaagcataacctgtggcggccggagtgcgcggtggtcttcgtgggctatcaggcggagggctccctgggccgccgcctgctggagggcgccaagacggtgaagctgttcggcgaggagatcgccgtccgggcccgtatcgtcaacttcaaggggctcagctcccacgcggaccgggatcacctgctggagtgggtgggccgcatcgcgccggcgccccggcaggtctttgtggtccacggagacgcgccggtcaccgagctgtttgctgaggacctgaaccagcggggcatccccgcccacgcacctctgtaccaggaggtctacgacctggctgcggaccggatgctggccaagggcgtggtgctggagagcaagcggaccactggcggcgcctccgccccttcggcggcctatgtccgcctggtggacgtgaccaaacagctccaggatatggtgggccgcagccgcggccgggccaacaaggacctgggacggctggccgaccagctgaaggccatcatggagaaatgggatgcttgatctgccaccgggcaggagagaggagcgtatatgaagatcgaccgaaaaggcctgaaggcgcaggccaagcaggccatccgtgcggcggcccccgtgttctggctggtcaccctggtgtatctgttgctgaccgaaggattgagcactgtggtaggctggctcgcccccaccttccagcctgcggacctgctttggggcggaactgtgggatggctcagcttgtttatctccatcctgctgaccctctatctgtgggtgatggactttggctatcgcctgtgggccctccgcgtcacccgcagccagcaggcggggtatgggacgctgctggagggtttcggcatcgcagggcgggtcattgccatgaacctgctgatcctgctgttcaccttcctgtggtccctgcttctgatctttgtgaccaccatcctggctttttttgtccttgattccctgtttctgcaactgctggtgatggcaggaatctatgcggcagtctttgccatcatgctccgctatgccatggccccctacctgctggccgactacccggacgacggcgcaggggctgcggtccgccgcagcgtggagatgatgcgggggcgcaagtgggagctgttcaagctgtatgtttccttcctgggctgggaactgctgggcgtcctgctcaccctgctggcctatctgcccttcctccccggtatcctggcccaggtcaactcggtcgcgcagttctactccgtcctgtccagtctcatcccggccactggtctggccctcctgatcaatctgcccctcaccctgtggctgaccccctaccgcacggcggcggaggccctgttttaccgctccatcctggagggacggccggccgctccggagacggaggcgcagagctgatgtccgccggaatgtgggcacagcgcagccgataaatggatatgagagcggcgcctggccgggcgccgctctctttcgacaaaaccgcaggcacggttcgtcattttttgagcaaaatgtgaattttcccggatctactggacattttcccgggacacgagtatgatattgtcactatgtacgcgccctcgggcgcccatccatcggcacagagggccgcgcccctgtgcagggaggtaatccatggccagttccatgttcggcgggatacaccccgcttcccgaaaagaaaatacccggcgcaagccgctgatgctgctggagcaccccccggcccaggtggccctgcctctggcttttcacggaggtccctcctccctccccctggtcaaagctggggaacgggtgtatgcggggcagcctatcgcccgtccggagggcgaggacggggcggtgctccacgccagcgtctccggacgggtggaggccatccgggagctgccccacccctggggcggccgcgcccccgccatcgtcatcgccaacgatggggacaatacgccctggccagagcggcctgagggcatcaagctcagccaggcgtcccaggaggagctgatggtccggatagaagccgccggcatcgtggatatgggcagtgatcccctccccgcccaggtgaagatcctccgggcccggggccgggtggacaccctgatcgtcaacgccgctgagtgtgagccctatatcactgccgacctgcgcctgctccaggagcggggggagcccattctgaaggggacccgcgctcttgccaaggtgctgggtgtggaccgggtggtgctggcggcggagagcgacatgctcaccgccgtggaggcgctggagcgccgcatcagccgcaagcggagccgggtggagctgaagaccatccgcacccgctaccccatgggggcggagaaacagatcgtccagtcggtcacccgccgggaggtcccgccgggaggtcgggcggaggacgtacgctgtgtggtcttcaacgtctcggcagcctttgcggtgggcgaggcactgaacaaaggcctccccctgacccaccgggccgtgacggtgacggggggcgcggtagcccggccccgcaacctgtgggtccccctgggcacgccgctgaaggagctggtctcctccgccggcggcttccgggaggagccgggcctgatcctggtgggcggccccatgacaggggtgacccagaagagtctggaggccccggtactgcccaacaccaacggccttctgtgtctggccccctgggagcagccccgggaacaggctcccaccgtctgtattcggtgtgggcaatgcgtctccgtctgccccatgcacctctcccccatctttgtggtccgggccctgaaggaaaacgcggcggagcgcctgcactccctccatccgcaggactgcatggactgcggatgctgcacctatatctgtccggcccatatccctctggccgacctggtgcgccaggcggctggtcaggtgcgggaactggagaaagggggggacctccatggctgatctccgcacctctgtcccgcctcagctggcacaggccaccagcactacctccatcatgctggatgtgatcgtggccctgatccccgccctaggcatgtccgtctatctcttcggtcccagagtgctggctctcaccctgatctcggtgggcgcctgcgtcctgtcggagtatctctaccggcggctgacccaccagtccaacaccctgcgggattgctctgcctgtgtcaccggcctgctgctggccatgtgtctgccggcggcctccccctactgggtccccctgctggggggtgtctttgccatcgtggtggtgaaacagttctacggcgggcttggcaaaaacttcatgaacccggctctggctgggcggatgctgctgtccaccttccccttcttgatgaccacctgggtggacgcgctggactatctccccgtttggggtgagatggacgccgtcacctcccccacccccatggccgccctgcacagcggcagactgcccgagctggacatggggcagatgctgctgggccagcacggcggatccatcggggaggtatctatctttatgctgctgctgggcggcctgtacctgatcatgcgcagggtcatctccccacgcatcccggcggcctttctggggaccgtggctgtcctcaccttcctcttcccccgggatggcacctccctggagtggatgacggcccagctgtgcagcggcgggcttgtgcttggggctttctttatggcgaccgactacaccacctcccctgtcaccccccggggacaagtactatatggggtgggctgcggcctcctcaccgtactgctccggtactatggctcctaccccgacggggtgggctgggctatcctgaccatgaactgcctggtgtggctcatggaccgggcggggatgccccgccggttcggggtggagcgcttcaccgccgtgcgggaggggctccgcgccgcaggggagagcctgtctgagatcaaatttgtcaatccgggccgcccctcctccctgtcctgggggaccatgcccggcgagcgctatctggaccagctccggccccaggccaaggccgccggcatcctgctggcggtggtgatggtcaccggtctggggatctactccacctactggctcaccagcctggacacccagcgctctgagctgcgggcggaggaggccctgctggcccaggtgatgccgggggctgagatcagcactgagaccccttaccgcgccccaaatgccctgagcatcacggcagggtaccgggaaaatgagctgctggggtactgtgtggaggtccagacccatggcttcagcggccccatcaccatggtggtgggcgtggacctgaacggccaggtcaccggtgtggcggtgacggaccacagtgagtccacagggatggggaccatggccatggagaatgcccagctgcgaaagtatgtgggcatgtcaggcaccatccggacctctggtgccaactcggtggatgtggtgaccggggctaccgcgacctctgaagccatcacggccggggtcaaccaggctctggccatcgtggccaacctggagaccgacggctccgtccaatatgtggacagcgacgtgtagcgggaaagaaaggagcggatcggatggattccgtacaactggcaggggtggcactggccgccctgctgtctgaaaatttcatcctggtcaactgcctgggcatcggcacccgggtggaggccttccacagcaccacagcagcccgccgcaccggcctgagcctgaccctggccatggtggtcaccgtattttttacctggtgtgcggactttctggtgctccggcattttgggtgggtgtatctgcgcaccctggtcttctccctcattgccctcctcactgtcttcctgctgcgaaaggcagcccgtctctggccggagctctcccatcgaatcgacgccgacctggcctcggtatccaccaactgtgcggtgctgggtgcggcctatctggccgcccagcgcagctacaccctgtcccaggccctcaccttcgccctgtgcggcggcctgggcgtcctggtggtcctgatgagctacgccggcctgcgggaggagatcagcctcaccagctgcccccggcccttccgcggcccggccatcgagatggtaactgccggcctgatggccctggccctggttggcttctacgggctgcacctgtcctgatccgtaaggcaagcaaaagaccggccccggacatcatcagatgtccggggccggtcttttgcttctcccttatttcagctcaaaggaggcacactcggtctcccgacaattgcagggggaggcgtcggtgcagcccaccttgatctggctcagggagcagtagttctggggattgtgataggcgcagctgttgacagtacactgaatattggaattgcagctctttttgttatccatctgaaagacctccttttgtggacggtcctagtataagctgccgcggcagttttatgtgtggtccgggccggaatcttcttcatcggcctgcaccggctcttcaggcagcaccttggggatgaaacggcgggcaaacctgccccggccacggtttttcacataaaaatacccaatgatggagaatacaaaggcgccgatgaaattgacgaacagatccttcatggtatccagcagacctatgtccagatagccgcccagccccagagggatctccttcccgcctgccaccacgatcacgtctgtgatgccccggatggcggtgatcttgttgccgccggtggggtccagcatgacggtgctaatgtcgtggacaatggtgtccttctgcatgtccagcaggaaaaagctgtccatgatacactcaaaaaattcccacaaaacaccgatggtcatggagaagcagaaggccacgatggccatgaacaccggggagagggacagggaaaaccgctcgttgcggttgaacaggtccaccagtgagaagccgatggccgcgcagaggaagccgttgagcgtatggagcatggtgtcccagccatggaaataggtgtagtaagcctggatctctcccaggatctccgcagagaagatgaagagcaggatgatgatctccagcgtgtcgggcagatcgatgcggacccgccgctcgatgacggtgggcagggtgaacagtaccagcgtcaggatgcacaggaacacgttttcaaagttcccgttgagaaattgggccaccatggtcaggatgaccaggactcgaagaatgatgtagatggtgaccaccgtttttttccccttcagctcttcccgcagctcacgccgcatccgggcagttttgccgggatcttttggtcgcatctatatctccccttttatattatatattgttatagtatagcggtttccggaacaaaagtcaaggaaaccggggcggcgcccggtggctgtccctctctgtcttggtctcccggaacagagagcgaaagtcagaatcatgaaaaaagggtggcaatcctgctatcttatggtatgatagaggcagaatgatcagagccggcccccagggccggtctgaggggaggccgatcccatgcccgcattttccccccggatacggggccacatcgacgaggcgctgacctttctcaaatgggtcctgtacgcctgcaacatcgggctcatcgtgggcgctgttgcggtggcgtttcattacggaatcgactgggcggctcagttccgggcgcaccagccctgggtcattcttttccttcccctgggaggcgtggtcatcgtcctgctctaccgctggagcgggatggagcgggaccggggcaccaatctggtgctgacggcggtccgggaggccgagcccatccgtctgcgcaccgcccccctcatcttcctgtccaccatcctgacccacctggtaggcgggtcggctggccgggagggggccgccctccagctggggggctccatcggggcctgggtgggcagaaagatccacctggatgagaaggaccgcaggatcatggtcatgtgcggcatgtccgccgccttctccgggctgttcggcacccccatcaccgccgccatcttcgccatggaggtggtgagcgtgggagtgatgtactacgccgccatcgtcccctgtgtcgtctcctctttggtctctgtccagctggcccgcttcttcggccttcatataggaacaggctatctcatcggaaatgtggctgtcctgggtccctggtccatggcccaggtgtgcgtgatgggggtgctgtgcgctctgctctccatcctgttctgcaaagtgatgcatgcggcccccaagctctatgccaaatacttccccaatcccctggtccgggcggctgttggcggcgccctggtgctgctgctgaccctgctggtgggggaacagacctacaacggcgctggggatgctgtcatccgccggatgctggcgggcgagaccatctcggaggcgttcctgctcaagctggtctttaccgccctcactctgggggccggcttccgcggcggcgagatcgtgccagtgctcttcactggtgccgcctttggcacggtggtcggaccgctgctgggcctgtcccagtccttcggcggggcgcttgggatgacggcggtattctgcggcgctaccaactgccccatcacctccatcctcctggcctatgaactatttaccagccggggcctgcctctttacgccctgtgctgtgccatctcctacatgctctccgggtactacggcctttacagcgagcagaagatcatctactccaaattcaaggccacctgggtggaccgaaaggcggagtagttccccctgtccacggcgccgttcttctgctccacgctcagcagcggaatggtgggcctgggtgctctgtctatgggccgcagtttcttcagcgacctccatgtgacggaactgtaaaacagtcctattcaagctcttattttatcaagcggagacatcccggcagaatttccgggacgtctccgttttttcttcataaaatgaaaaaaatatttttccccttgcaaatttaatatattttttcattttctccattattgcactttctcctttgttttctctgtacttttttccttccatgtaagaacgcataaccttttccctctcttttctttttttcgcctttcttccgggtttatttttggtcaaaacattcaatttctgcggcacccttctct

SEQ ID NO: 13517 - DNA, 46558 bp, Unknown
  gut microbiota DNA sequence
accgccatggccagagacagcgccgccgcagtggacacagtcacaaatctctgcatctttcttttcatctcagatacctccttatatttttgtttgccccttcacattttggtcattttctataattttcctctcatattttttcttttttattatactatgtccaccctctattttctaatgtgcattttcgattgtttcatatcatttttacatgattttacgtgcgataaacgtcacgctgccaatgtcatcggtgctctgggctcttgtatactcctgttcgttgggggccagcatggagagattgacattgtgttggggcggcttactcttgtgtcttttccctcattttagattaacgctgtgcagtaggattcaaaaattgactcctgatattggacaatcccctgtatagtcatgtttttcctccgtttcatcttcctttgttcggggctccactctgcattacgacggcaggtggttaagttccggcgtatttcccaatataaattaaaaagtcctctattcccctttccgctttgtatagatgccttcaaattatcctacctcaaattggggcaggtttcggcaagcgtaagcgtaaaacgcgagccaaaacctccggctaagccggagacttgaatagtccctggaagagcctggcgccggcaggcatctcaagacgcatagaatatccttcgcctgcatcttgctctccgccgcccgcaaacgggtatattatcttctatttcaaatttcctcataactgtcacttggtaagttgtcaactcgcttcgctcgcagctttttgctaaagcatacgaagggagcttaccagcaaagctggtgattctttttgcccaaaagaaatgcaggcgatcaaaaaggcgtaccctgataaagaagtttttcatattctgcaaagacaacggcacgatactacggcaccatgtcattgttcttttgctgtattcgagaggaacagggttgtagctatttatgttgatgatgggggagcagataagcagaacctgtgaatttgacagcaccgcccgatcccctgtttcagggaaccggtggtaaaattaggatggtaaaacatttttaatccgtcggcaaggaccatagaaataactaagaagagagcaaaaatcttctattacagccgcattggaaactccagttcgatcaggtcatttctagttgtttattgacatttcctcattctgcactattattaagaaaagcaataatgcaagatggtcgtatgttacgagaacaatctgtatcatctaaaaagttagatatgggataggagtcggatactaattgagctacatatcggcatttgatccgtcagaagacaaaaagaggaatttagcctctaagatattatatatcagcgaaagcgtcataaaattcttctgggatgacgcgccccggctcggcattcagcagcgagaggggccgcaggacatggctttcgacgtgccggacgcaattaaaagcggcgttatgttgtgattgagactgcgttgggataggaaaaagctttgcctatctgatgcccattttgctttacaattccaaaacctttcatccagtcgtaatcgcaacgtcaaccattgccttgcaggagcagcttctgagcgatatggagctgctgaagaaatggttacgccttgatcctgacctcattttggcgaaggggaagaaccacatttttgtctccaagatgtgagtcttaagtttacgatacaagtgcagcaaaaaaagaagtgactcaaggcggaagaactcccaaaatggtgtttgcgaacaaccaagaaggaggcctagccatgagccactatagatatcttagcatagaagaacgggaaaaactatgcctgacaagaggactgggggcgaagctatgtgagattgcccaggaacttgggcgtgctgtgtcaacgatcagtcgggaactgaaaaaataagcaggtacggcagccatatagcccatcacaggcatagaggaactatgaaaaaagatgaaagggtcggaaacatattctttgtgatcccgaaaaacagaagtatgttcgccgcttcattcaagagggccattggtctcctgagcaactatcgaaccggttgaagttggaatccgcagaggtacagatcggctatgcggccatctatcgcacgctcaaagcctgggtatttgactggaacaagcgggcaatcagcaggagtaaaaagcaggcgctcgcctatcatcttcgacgcaaggggaaaaacgaggtaagaagtgggataaacgccggcaaggcccccatttttgtgatgccggatacatgaccgcccattcgcagccaatgaccgcagcgaattgggagattttgagtcggatatcgctgtgggcaagcgcggagaagcatgtctcttatctctggtagacgggaatctaggtttaaccctggccgtcaagttgccccgaggaatagcgcaggcagcccgtgacactatgactgttctgcttggcagtttacctccaaacacggtgaaagcatcacgcctgactgtggggctgagttctcactctatcaggatgtctctaatgctctcagcaatgtcccgttttactttgccgaccctcactctccacggcaacgcggcaccaatgaaaatacaaatggcctgctccgtgaattcctgcccaaaggttccgatttcgctcttgttttaccggataccattgaccgcttcattttcctgttaaatctgtgccctcgaaaatgccttgcctgtcgttcccggctgagatatttttctcgacgctgttgcacttgacttgataacttgcctttttaggtttgacttctatatagccagtcttacagatgctcgaccattgttagaaagctaaatattctgctgcaaatctcaacaagtggtttagaaaaggttggaatgctctactccgccgagtttttcttcaatgctttagatggttctcagcgttagcctgagcaaaacgaaagcaaataaatgcttcagcgcacaactgttgtatgtggcggggaagatgcagctgactacaggcggaaagaacttttatgccggtcccgttgctgcaggatgtgcagagcctcacaggcagcacggcaggcccgacgctcgctgctgtcatccgtggaccaggtgttgtctaggcggtttgtaatgacagagagaatggaggccatacgcatattgtggaggtatcccaccacaaattgtccggctgagtctgtatcgatgttggtcacacgtgcttggcgcagatcgtcaattaagtgctgggcggaggagggccaatagccctgttcgctaagttttcgcccctggccgatatacagggaggaagggctgtacatgattccatatccgtaacgaaatcccagatgctcgcaggcttcgcccagagcatttaccacgtccagattagccacagcaggaaagcttcgatcgatataacaatcgctggtaccgtcagcccggatagcagccactggaatgatcaggtctcccggggcaaagcgggggctgatggagccggtagtgccgatgcggatggcggtttccaccccaatgttgcacagctcgtggatacagatttctgcactggtagtaccgatgccagtggagacacagccaatttcagtaccctgatatcggccacgggcggagcggaactctcggttatatttcagacaggctccctcctccagcacgtcgagtaccaggtcaacccgctgaggagagccgggaagcagcacacctttgggcatatcgccgggatggagctgaatgtgatattcctccgctttggggcggggaaattcggtttccagatgagacatagtattaatactccttgcagtcaatgccctttgtagcggggccgtagggataggggtatatttccccaatggtcatcaattcaatttccccttctgtggtggcaccgatgatgcgcacatctgggttattgtcgcaaaactcccaaataacctggcggcactcagcacagggaacgccggaataggggccgtagcataccagtgtgtcaatcacccgttcaccgtggatggccatgttcatcacggcgttgcgctcggcgtggcaggtggtctggagagagataacctctacattacacccaccgtagcaggtgccggaagctgtacggacgctggcccctacctggtggtggctgtagggggtatatgcgttgtcccggtactgcatagccagccgaaccaggctttggtcctgtggggagagcttgtcaaatgtagtgatggtcataaaaatcctcctatctactaatcgggacgaccggtgtggtcagtggacttccgcccgctgcctgccgttccaaagtccgatgcagaaaggaatggcggagacgatcaggccgcccagggagccggggaaaggttcccccatcagaatgagaatgacagcggtgagtacgccggagacaatggtgagcaacatggcgcggtcggaaagcttccagtggaaagaaccggcgatgacgggcagaagcagaccggggacatagacggaatagccatacatcaggatctgggtgacactgggtactttcagagccagtaccagggcgatcagtcctaccagcaccacaaacagccggttgaccagtaaagaagaggccggcttttcctttcctgtgtttcgcaggacggagtagacatcctgctccagggtggaggaacataccagaagggtagaactggcggtggaaacagccaccccggcaaaggcggccaccagcaaacccagcatccccttgggcaggaccagctgggaaagattgagcatagcgctggcaggatcggagccggcaggcaaaataaatctggccataataccgatgaacataaggatcaggccaaagataatcatcagcaggaaagcggcagtgatattgcccttggcggatttctcgtccttggccgcaaatacccgctgcaaggccatgttatcaataaaaccggcgggagccaggagccaccaggtaatcatagttccggcgggcacactgccaaaaagcttgtaaaatccgtcgatagaagtggtttgagccagggcctcgggcacgtcgtagtgaagcagcagtaccgcagggataacaaggcccaggaccacaagaaagaggactgcctgcagggaatcggtatacactaccgcccggaaaccgcccagcagcgtgaagagaacaataatgatataggccacaatcacggcggcagttccgttcaggtcggtaaaggtggtgatgaccaggacaatccccgccacttgaccggcggtccaagccagataattccacacggtcactagggaggcagccacacggacagccttggaggagtggttcacatccactacgtcgggaagagtaacgtgcattcttcgacgaagcagctttgccatggtcatacccataataaacacaccaatggggaaagtagcccaccaccaccaaccggcaattccatattcatatacatactggggggtaccgaacagaccggacaggccagtgaaagaggcaaagagcgatagaataatatagatgttgcctacgttccgtccggcgaggacaaagtcttcgtccgtcttgactgttttcatggaatgatagccaatgtaaagcattacagcgagataggcaagaattaccaaccagtctaatgcactcatttttaacattcctttcatcaaaaattcttgccggcatgtttattttacacaaacacacttttaaaaactatgacatgcgtcatagttaaaattttaatttatgctatcataaaagaaatagagagcactgcctacagcgctgtctataaaagaggtgtatgagatggaacatgataatcagacgatacgtcagttcttatgtccctttggctttgagccacctgattatgtatggaagaagatgcacctgaggacagtaccagctaaggcggttttagtgctggcggggagcaatctgaatgcgatcgatatccttcttcagggagagatacacgtggtcaactccttttccgatgggaaagagttcggctacaccaatgagcgcagcttgacccttttgggagacatagagtatttttccggggtgaagcagtatgcctcgtcggtgattgccaagaccacggtgacactggcggagctggatctggagtctttccaatactggtttgactgcgataagctatttcgggatcatgtggtagctcacatcgcccaaaaggcgtataaaatggcgggcaggtttggcacggaaaaatatgaggatgccatctaccgcctgactaagaccatactggattatctgccggatcgggcggagcacggcggcatgctggctctgcactattcccactttgaactggcttttctttccgggatgagtgagcggtcggtaaatcgagttctgaagaggctgaaagaggaaaaattggtcaccataggtcggaagcgggttctcatctggccgaaggacgtacagcgcctacgaactatgctggaacagcggtattgaaacggaggaagagaaggaatgtgttgggaaacagcttacgagcagtggttgaacgcgcctgccctgtcccaacaggaacaggaagagctgagggccattcagaaggacaagatggaactgcgagagcgtttttacgcccctttggctttcggtaccgccggacttcgcgggacgatgaaagtgggtctacaccatatgaatgtccatgttgtccggtgggtgacccagggatttgccgaggtaatctgtgccgagtctgattgggccggggaccgaaaggccgcggtatgcatggatgggcgtaagaacagccggcgttttgccgaagcggccgcagaggtactggctgccaatggcataacggtttatctctttgacggccctcgcccaactccggagctctcctttgccgtgcgggcctatgggtgcctggcaggcatcaatatcacggccagccacaaccccaaagaatacaacggatataaagcgtactggtgtgatggggcccagctacagacagagacggcgatggctgtttccgcacggcttgaagaaatcgatgtgtttgctgggccaaagcgtatggatcttcagcgtgggattgagctgggacggatttgtttgctgggacggtcctgcgatgaggcatatctaaaagcggtggaggagctgtccactgtctggccggggatggaagctgataaagagaaagtcaaaatcgtgtatacgcccctccacggctgcggataccagctggtaccagaaatcctgtgccggacggggttgcagagactgctctgcgaacccagtcaaatggtgttggatggggatttttctacagtggaatcgcccaatccggaatatccggagagctttgcccgggcagcagaacttgccatcagagaaaacgcggacctgattttgggaaccgacccggattgtgaccgggtgggccttctggtgagaggaccgtcagggaaatttctccccctctccggcaaccagacaggtgtactccttcttgactacctgattggtgcccaaagacggtctggcaggctgccgcaaaaggcaattgtccttaaaaccattgtgacaaccgatatggcccgagccatagcgcaagacaacggcatcgcgtgctatgatacctttacgggctttcgctttcttgctcagcggatggaacagctggagcaggcaggggcgggcgaggtgattttttccttcgaagaggcttacggctgcatgattggacaccacgtcagagataaagacggggtatccaccgctatgctgattggcgagatggcggcgtggtacgctgggcaaaattgttctctgtacgatgccttgcaagccctctatacgcgatacggctggtacggtgagcggactgagcagttttaccggactggacaggcgggagccaaggaaatcgctgactttatgacccacttgcgggaagcgccgccgaagcagatcctgggaactcgggtggttgctgtccgggactatctctccgatgaccaacagagcaaggaacgaaagcgttctgcccccgcccaagcctccaacgtattgcggctggtgctacaagacggtgctgaactggttgttcggccctctggtaccgaacctaaaatcaaattttatattctggtctgcggcgatacccctgaaaaacgggatgcgcttctggaacggtatgcgtcctggatcaacggattggaaattgcccgctgagccgttatgaaaatagggtgtggcacttcctattccattgattctgtccagtacaaagtttgaataggttacaatttggagtaagtgctaaacgcaaagcaagactaactatatagaggatatttctttcacatgcacagctaattttaatttgagataaaaggaagtctgtaaaatataaattcaggcagttattaattttaattttttatgaaagcagctggcctgaactcaggtcagcctgctttttcaaatggggccttctcttcacttttccagacacgatgctcagtcttttctaagcaaccggccactccgcttccagctgccactgaaataatagatcgtcccaacgaagaagggcacccagcccgcaaaggcattgccataccagaagccgtaaactcccagatggaagcagaggcccagcagcaacgccaaccctatccggacaatgactccatccaacagtgccacagcaaggttcaacctggaatttccagacccgttaatcagtgaaagcatggacggccggatgatcgagccaataaaggagaccaccgccacgggcacataggtcaccgccatatccagcgcctccggctcgctgaggaagatcccaaaaaccgcccgaggccagcagaccgtacacaggataaatacgccgctggcagcaccattgatcgccaggagcgtcaggatcacttcggtgactctcttgtatttttttgcaccaatgcactgtgccaccatggaggaccccgctgttgtaaaaccatggacaatggtgttgttgaacatctccagtttatgtcccattccggagactgccgaggcaatcaccccataggagttgacccaagagttgacatacaccctggaaatactgacagcagcggattgaattgacatagggatccccagtgagatcagtggaagcaatgtgtctcttgtaattcggaaacttttcggtctaaagtcaaataggaactccgcccgtctccggtacaagatcatcaaggcacagagaaagctgactgcctgcccgatcacggtggccaaggctgctccaaacacctccatatcccaggacaccacaaatacaacatccagaatcgcgttcaggacggaggcgattgcaataaataaaaacgggtgtctggaatcccccatgccgcgcagaatggcgctgaccaggttataaccgtagataaagaccaatcctatcatacaggtaacaacgtagtccatcgtatagtcccaggattctgccggcgtcttgacccatacaagaatagagttacgcaacagcagaaatatcacagtcatagcaattgcgcacccacccaagaaggtaaagagtgtcccaatcattttggaaaccttttcggggtggtttgcaccgacatactgtgaaatgatcacttgtgctgcattggaaaatcccattgctacgaaggtcagcaccatcatcagatcgccgccaatggataccgctgacacacctgcgctttccaaacagcgccccacaaccaccatatctaccatattatagaccgcctgaaggacacctgagagggcaagcggcagcgcaaagagcatcagctctctaggtacgctcccctccgtgaggtcctttatcagcgtttttcttttcgaagttttttccttttgctcctcctgtccttccatatccttttcatcatctctttcctgtgctacactccatttggaggtgcacaaaatgtactgcaccataccctttggacaactttacctttcataatagcaatcacgcctcaatgaagcggcggcccaaactaccgcttcattgaggcatctgtcattctgctcgccccttttctcagcctcttatcattcagaggctgatcccatgagccctgtaatagcgcttgcactcctccaaagtacgacagttatattcaaactggccataaagtgcgtttcggtcttggttggggatctccggcatgattaccgccgtatccgggatcacttccagccactttgtaaggtcgagcccgctctcacccggccacaggcggtaactgcgtccctcggcagccagttccctgtgaccatcagggaacgtgatgtgtgggacatcacacagatgaaattccccgaacagctccggagggcatgcggctatctcttccggtgtaacgctgctataatacagatgcatgatatccagagtaatccgggcatttgaccgcccaaccattttcaaaaggtctttagctttctgcaaatcgtcgcatatcccccaggcaacaaactccaaattgacggtcagtccatactctccgcaaacagcgcacaggtggtcaaaccgctccactgccaggtcctgatttgtggtccagacgctggtctgcacccctcccagctcgtgttttcccgcaaattcaaaatagtctcgcaaatcatccggttctggagacattcccatgccgtaaggatgaacattagccggatcgtcaatgatacaatttccaatgccgtccaaaaacaggcctgtctcatccaaggcggtctgcacccgactccacaggccaggttccgcaagcagctcatgaagcggccctttccctcccctgggcaggatcatggcaccgcatccgtcatatccggcccggtgggccatatagatgctctcccacagatgcggggtcataaacatacctttccataattttttcataccaccacatatcctttcacaaaagggtttaggtcgccatcaaaattccaccgttcatgtccaagcagtctccggtcaaatatcgggactcttcactggcaagatagaccagtgccgcagccacttcatccagatttgctaccggccggtccacgatcacagattggccgttatagaggtcaggtccttggtatcctggcatacccggcacaccgcccggtggcatcttgaagggaatggaccctttctctgcgatccgctcaaactgctttgtattcagcgttccaggggcatatgcagtcacattgattccatagggtgccaactccatagccagagccctggtcagggcggtacatgcggcctttgagctggcataggagatcgccaccatccggtttccccgtccgcccaatgaagtgaagttgataatatgtccgccgtgctgctctttcatatagggcattgcagccagggcggcccggtatgcccctgtacaggtcacatccatcgcccggtcccactgctccggcaggatagcgtccacccagcctgctccgtgaaagccagccaggtttaaaaggatatccacgcctccgaagtgattcaccgcaaaccttatagcttcgtccatgtccgcctgttccgtgcaggcgccaataaatgtcacgacccggtcctcaccatactgatttctcagttcggcggtccgttcaaaatatttttcgtcaatatccaccaggacgacattagccccctcctccaaaaatgttttgcaggccacggagccgacggaagagccgccgccgatgaacacagctaccttgttgttcaaacgattcaaaatgttcccctccttcctcaaatcgcaaaccggccgccattgagatctatgatctcgcccgtattccagaacaccgcaggatcagccaggtacatcactgcattggccacatccgctccagttcctttcactcccagcacaggccccgcatttttctctaccgcaggttcggcgtactctcccttgattgggcccacagctacaccgtttacggtgatcctatgcttgccaaaaaccgtagccatattacggatcagtccgccaagccccgcatgcgcggcggcactcatcacattctcccccttcactccagtacgtccgcagatgctctccaccacaacaacgcttccgctctcctgctcgatcatggcggggactgtgtatttcagaacagtctgcacacctgtcatgatctcatcaaagtatctatgcgcctcatcctccggtatctcattccatacaaatgcgggcggctgtgcggcgaggcaggttaccacaagatccgctgctccaaactctgacagagcatcccgtattttgacctccatctccgcttcgtcatagaaacgatccacagatacgatcttgcaggtatcagactccaccattcccgctgtctcagacttgtctgagacgagaaacaccactttggctccctcaccctgcagcatccgtgcacattctattccaatagaaccgccagacgtggcgatcaccacaattttattttgaaatctcataaattttcccccctctatggctgcatgaactgtccgccgttgacatccagacagtctccggtcaaaaaggcggaatcgtcgctgctcataaacacgatgacatgggcgatctcatccagggtcgcgaccgggcggtctggcaggaacgagccgcctctcgtggctcctggtcctcccttcaacgccccctttggaggctgcatggggatcgagtccttttccgggatgcgttcaaaggcggaagtgtccagtgaagcaggcgccatactgtttacggtaatgccgtcggctgccaattccagagccaacgcccttgtgaggccgatggccgccgctttgaacccggcataggtgactggtacgccccggttggcccgaccacctatggaggcgaaattcatgatccgcccatagtgatgtttcttcatatagggataggcagcgcgcacagcccgataaatccccaggcaggtcacgtccatggcgatccgccactgttccctcaggaccgtcgtaatgtcgccgcctccgtggaatccggcgtagttgcacaggatgtcgatcccgccaaactcctgctctgcgaatgccatcgcacgctccatatctccctggcaggtgcacgccccgataaaggtgcggattcgctccgggtattcatctcgcagctgtctgctacggtcaaaatacttctcatctacatccacaaggagcacctttgccccttcgtccataaagtgcttcagcgcaatggtggcaaccgcagagccgccgcccacaaagaccgccactttatcctgtaactttttcaagaccacccctcctataccatgaaatatccgccgttgaggtccaacgtctcaccagtggtccaagaggccagaggcgctgtgagatattccacagccccagccacatcgttcagctggcacagctcatgccctgggaggataccctgcggctccggcgtgccgccggtccggtaagagccgtcttccaatgcggtaaccgccaccgcgtttccagtgataaaatgcactcccatggtacacccgatattgcgtgccatcccacacagcgccgcattggcggctgcgtagaccggtgcgaccccggggatagctgtgcgcccggcaatactggagaccaacacgatgcgcccgtagtttttttcgatcatcatgggcatcagcggctggatcgtatagaggctcccgttggtgatagtcttcatgacacggtcatattcctcctcatccatgtcgtaggcgggcttggagggcacggtggtgaccgcggtcacaacgatatcacaggttccaaacttctccttcacctggtccgccgcccgtttcagctcctcatggtcccggaagtcgctgatctggatggtgagcagtctggatctctcttcttcgctgatctggtcaaatggccagagccgggcctcctcatcatagtacagcgcaacctttgcgccctgctgcaagtagttcaaagcacaagcagcccctgcgtcagagccgcaggcagctaccaccgctgtttgattctcaaaccgcataaattacctcctgaaaatccggtgcctgccggtatctcggaatccatccgggacctcgctgcgatcccggatggaattccggctatcgatttcccccactcaggggatcagcgggaacatatagggcgtgtaaatagagaaaataatggtcatcaggatcgtgatgggcaggcccatacggacaaagtctttgatccgatatccgcctgcctcatatcccatcatcatggcaggagtggcggtagggagcatgaagcagttggaagcaccctcctgtgcactcatcatcatggcccggccgtcataaccaaactgtactgcaatgaccgccgcaagggtgcggaacgcgctacccacggccaggttagacataaactgggtcaagagcatgcagacgatgtacatggagaccatgatcgcgatgggcggcaggtccccggtcagctggtggaacacctctgcgatcagctggtccgcgccggtcttgctcagcgccgtggccagaggcagcgtgcctaccgtgatccagattacgggcgtcgtcatggcgtcccgggattccttgatactcatggctccggaggcggtcaggacaaaggcggcgatggtggcagggtaccatgtgctcaaccctgtcagggcgcaggtgacgatacccaccacacaggcgataaagacaaacaccgtgaatttctcctgcgccggagtcatcgttgtggaggatgccttggccttgttttccgcaactgcctggttcgcggcggctccctccaccttgctggggatgttacccagatccggagccattttcagcgtgacaaggatgacaaagggaatcacgatgatctcgatggggatcttgttaatcatcatgctgaagaactcaaaggttccgacaccgcctagattttcaaggatcgtattatactgcagatagcccgccgcattgccgcctgtgggcaggaagccaggccagatgtgggccagtacgcaggctgggtaaatgaatttgctgatggggcgctgctgctccgcgcagatgcccacaatcatgggaatgacgatggtcagggtcgcgacgccgttaacgaagttgcccaggaacaagatcggaatcgcaatcccgatcatgattttcaggtcggaggcccctggcttgatcagcacgccggtcatcttgccaagcagggaggtcttgcccacggcggcccccactacgaacatggatgccatcataatgaccgagttgttcaccaggccggaccatgcttccccgaagtccaggatctgtgtgacctccagaataataggaatcgccatggcggccaggtctatcttcactttattactcaggatcaggacgacgaatattacaaaggttaaaaggacgataccgatttgaacagtcatagttctgacacactcccattctttctcgattttcggaaggtactcagtgggacaactctgacctctgtgtgtttatcaccgcctcgcactttgtctccttgcacaagtgagctctaacatatgttgggtttattgtagcgtttctacgaacgcaccacaaataccgataaataatggcccataagctgaggttatggcgactcagcctatgggccatttttgctgcctggaccgcttccgggcaaactcgatgaattttctcatgttttcataccgctccgaggatcttttccataccagatagagctggatgggaccgccgctcaggaacacggacgagagctcctgcttgaggcggcagccgtgtatgatgccgatatggtccacaaagtccccgttgagcatccccaccgcggcgtcgttgcagatcagattggcgattccggacaactggggcagggtggctacatggttcaatacacagcccctgctgtccatcgccgccctgagccgttccagtacctccctgtgcccgtcccaaaaggcgatgggacagcggtccagctccgccagcccgatctctcccagcttggccagcggattcatggcatgacagtagagcttgacctcctccatctctcccagtacgcagtacccgtatttttcctgccagtccggagggagcaggcgcatagtagtagccagaaagtcaaattggtcctcatccaaaaacagggatggggtcacattccgcatctcgttgaacaccactctggtctccgggaaacactgctgaaaatcccggcacagctggatcatctccgcctcgccggagtaggggcgaaagcccacccggactgtgctgcggccctgggcaatggccggcaggtcgttctggagcagacgataccgccccaggacagcctcaacatgggctaagagccgggctccctcctctgtgggggatacccccttggaggtgcgctccagcagcttcactcccacctccgcctccagttctgagaggcgggcggagagtcccggctgagagatcattaggatctttgccgccttcgtaatattgtggtaacggcagaccgtggaaaaatactgcatttggttcatagtcattgcagatccctcccttaagctgtcctctgctgcccagacaggcttgtaccctatttatgctgcaatgatggcccatagaaccggatcatccagttccagcaggcggagcagaccggtttcccctgaaattcataaacttcccgcataccgtccagaagatgctggacacctcctgtccatatttccgcagtatgatcctgtccccatccgccagaaattcaatggaacagccgggggatacttccatctcctgccgcacctggatagggatacatactcggtggttgtcatccagcactcggatatagacttccgccttctcatccttcatttcattctccccctctgcccttcggggcagcgccgcgcagccaggaggtggggatactcaccacctccggggcgttttccagattcagtaccacatgcctgtctgcgctgagacagctgcctgatgtccgctccatactccctccgcagagtaggacgtccgctatctccgctacggcctggctctctccatggattacctgatggaaggccgccgcgtatcgccgctccacatctcccctgggcgtgaccagctccatccacgtttcccctctgccgttctgggccagataccgcagcaaggcagggaacaccggggcgcaggtggcctcgtccaccaggaatcggacgttatgccggaagcagatcatttggagcaacgcgagaaaacggtcgatcacttcaaacaccacgtccggccccgccttcaggtgcatcaatcccaccaccagggggagggccccctcccggcgcatcatctcataccgggcgatgagctgcttcagcagggcgacccgggttttgtacgccatcttggacaaggacgctgtggagataccgagctcttctgaaaccgcccggcgctgcacacggtccccggcctggaaaaccagccgctcttcccgcggcagggcccggatgtgctctttcagataggcggcggtgtccgggtcggtgacgtccagcacagtcagtctcctccggcgccggacggaggagaggatctgcgcctcttccccccgcagctccaggtacacataggagatcaggcagtcgcaccggcgtaggatagcctggagcagcctgtgacggcccatatcggggctgttctccagcaccgggatacggatgatccggtcaaaaacgcagcaggccgctggttactcctgccattgggcgctgaccgccagagtcagggtgacaatcctgtctggatgccgccccttgacccgcagggcggccgccgcgcaggccctcggaaattcaccaaaccacccggggaaatacagctccatttccccgtgagcggccaggatctcctccagggcctcctcaatccgctgcgtgacctcatcatatatacggaaggggtcgcctaagaaagtgcaaactttcattctcactcacttctttttatctccctgtgcccgtgcacgggcatagtgggcaaattttattgctatcatggataagtcaaattcaatggcatatcctaaagatagcaaggtagttcattatgaaagacgactattctgagatcattgtcaacagaattctatcactgtgtaagcaacgggatatttctatatatcaactgtccattatgagtggtgtgagccattcgacgattgataatctagtcaaccgcaagacatataacccgaaaatcaaaacgctccataaaattgccttggcgtttggatttactctggccgaattggttgactttcctgagttgaatgacttttcatttgaagacgaaggtgattcttaaaaattatgtagtgtcctgcaccttgagttgagtgtatcctcttaacgagaggatacacttttatattttcccttagtataacatacattttaatctattggtacatttttttcaagtacatatagaaaatatacgaattacttaccttgggatattctttaaacaatatagtacttatagtacaagcgaattccgtgctaaaaattttagaccaaagaggaaataaattgccacccccacacaaaagaaaggacgattgttttggctgacaaaggacaaaacatggaattaaaccttgaactgggccagcgggtaaaagagctgcgtgaagcactcaatttatctcgaaaagacttagctgaattgcttgatatttccgattattttttagttgaaattgaacttggcagacggggcgtttcaaatgtaactttatgtaagttagcggatgccctatgtaccacaacggattatttattaaggggtatccatgggccttccgatattaagtcgataaccgctcttctggaatctgttgatgagccgttgttgcatagtgccgagcgattgttaaaagagtatatcaatggtatccactatataagagcaaaagaacgggatatttcttatttgggaccggaaataaagtaggccatgattcaatatagtttcccaccatgtaaactgagtgtatccctctaatgggatacactttttgcatcctatcaagagttctgttgtcttttttattatatctcatttgagtattatattgcagctctttatagttttattttatatcttatttgaaggtcaaaatagttgtggccaggaggtgatatctttggatactattcttcgactccgtgagcttatgaacagccgtggatggtccgaataccgcctagcaaaagaatccaaattgtccatgtctacaatttcaaatatatttcatcgcggttccatacctagcatccctaccctggaaactctttgcaacacttttggaatcagtctgggtcaattcttttcagacggagatgagccgatttctctcactcctgagcaaaaagaattattggataactggtccactcttagtgatcaacagcgtcatctggtgaaggaattacttaaaaacatgtagtctctggctgttctgaataaaataaagtgttttccaaaatttatgaaattatagcacagcttataggtataagcaggcatccgcaaaattcttgataacatgaataaaactttttgtaggtggttatttatgccaaagctgttgggtagcacattaggggcaaatattaaaagaatacggcttcggtgtggactgactcaggaagagacagttgccaattgcagaccttagggtctccgcttagtcgaagcacatattcccttatagagtcaggcaaaggaaatcttttggtaaataatctcgttggactacaaattgtatttgcagttacatatgaagaattttttaaggatatctctcctttacaggaggattctacgatgccgcccttaaaaggaaaagattgaagcttgacaccccaaagccttcggctgagtaaagttgtaagataacggcagacacatggagaaccaccatgttctctaccttttctttatgctaaggtaaagtcggaggtggcaatcatgaaggcggggcaacgtaagcgtgtatggacggcagagcagaagaaggagcttggatataaacatatataaatataggagtccaggcccgccgtagccgtaaagaactactgagggcctggctcctgttcaatttgctatgcgccggggataactaaggtccggcccccgtagattttgtcgggtagtgtcaacagttttttgcactttggtttgccactctggtatgaataaattcagccggcaatagatgcctcctcagcggcagcctccaggtgcttcatgttcatgtacttcttgttgcaccaccgggtgccaaccacatgggtgcgacagcggatttctcggttgagcatctcaatgaccttgccgccccacagagcctgggtaatatcctccatgcacctgacggatcacgtctcaatgagagctttctccatcttgccgcaaacaaactccttgggctgcccccttgattgcttcctcatttagctgtacaattttctcagacatagtttgctgtctccttttagaatggtgtgtcgcgacttcattccacatgagttctgcaaaccatgtctctttttatccatttcttatttgcgaaagttatcctaccttatccaccaaagggagtatccttcaagtggtcaaaacagaaatttgtctgtggtaaaattatggtcaaacgaaaaatcaccgccaaattggcggtgattttccttaaaaatggtggacctaatcgggatcgaaccgacgaccttacggatgcgaaccgtacgctctcgcgaggtggtaagttttctgcccacggactgcggcatgtggggcgcttatataatgtaagaatggactataatttcttagcaaaaacgagaactgcgaatgacgctttaaaagtgttgcatatcagattcatacaactctgtttggagtaaaggttgaagaataacaagtctatcaatatgccccagcacacacaaagcccgcaacgaaaaattccgttgcgggctttgtgtgttgtgctgttttttaaaagtttccgccgttatggcacctctttgcggaagcacatgaaccagtccaggcaatactgattctcgctctggttgtccatccgctccttggctacgccgcagctaccagcggtgggtacgatgacatcatcgccgggccgccagtcggccggggtggcgcaggcatcggcgtccgctttctggagcgccaggatgatgcgcttgatctcgtcaaagttgcgacccgttgacaacggatagtacaggatggttctcaccacgccgttggggtcgatgacaaacaccgcccgtaccgcctgggtattggactgccccggttggatcatgccgtacttgttggccacctccatgcggatatcctcgatgagggggaaggtcacattgatgtgtttcttaccgttccactccagctcctgaatcttccgcagccaggcgatgtgggagtagatggagtccactgagagccccaccagctcagtattgagagccttgaactcgtcgatcatggagccgaaggtcataaactccgtggtgcagaccggggtgaaatccgcaggatgggagaagaggatcacccatttgccggcgtaatcctccggaaatttgataggaccctgcgtagtaacagcctcgaaggacggagccttgtcgccaataagaggcattctgttttcctgatccatggtaagtgctcctttcgttagtagtcaagttcgatgaatacgatatataagttctttggagaaaggtcgtaatactctatctgaaacagtgttaacccagcagctcgctctccagatcctgcagcatgagatccagcgcagtgatgccgccctcggcggtgtaccacacggcgggatgggccagatagacgatgttgccgttcttgtaggcgtcggtgcccattaccagttcattttccataatctcccgggccagtttggcaccgtcggtgccgatggcggcatcacgatccatgacaaaaatgtaatcaggagccttctccacaataaactcgaaggaagcctcgttgccgtgggtggaggtgtcgatgttggcgtccacgccgatgttctcaaagccgagctcccggccaatcatggaacagcggccgtcgttgccaagcacattgaagctgccgctggtaaccagtcccacgatggcggtcctgccggcggcaaattcggacagggcggcaatacggccatcgaagtcagccatcagctcgtctaccttctcttccaagccaaacatggaggcaatggtggtagcgttctgccgcacgctctccaccacgcccagctcagtatcggtggccagatacaccacaggggcgatctcgctgagagcgtcatagctggcggacaggcggccgccgatgaagatgacatccggctcgcaggccatgacggcctccagatcggcctccttgatggtacccagattgacaatatcattgttgatgtaatcctgaaggtactccaggctggtatcggcagtgcccactactcgttcgcccacgcccagggcatccagaatatccagagaagccatatccagaatggcgatgcgctgaggatcatagggcacctccaactccgccgcctccttgttggcattgaggctggtgatagttacagactctggggtctcgtttctctgggtttccccgccggactgactgctaccgggcgaggaggtattctcggaagaatcagtgccattctgagcggaacaggccatgaggctcagggccatcacaccggccagagcaagagaaagcatctttttcatgttcatttttggttactccttttctaaaaaagtactgaaaatagtggggtcaatagtagatggacaacggcttgcccgcaatggtcaggatctcgaagtccacctgatagatctgcgacaggttctctttcgtcatcacctcttccacagtgccgaacttagcgatttttccgtccttaaaggcacagatgtaatcagaatagaatgccgcatagttgatctcatgcagcaccaaaatcaccgtcttccccagctcgtcgcagaggcggcggacgattttcatcatgttggtggcgtggtagatgtccaggttgttggtgggctcatccagaagcacatactccgtgtcctgggcgataaccatagcgatcaaggcccgctgccgctgacccccggaaagctcatcgatgaagcgatcctggaattcttccagctccatataggcaatagcccggtcgatgatcttctgatcctctggggtgacccggttgcctgaatagggaaagcgcccgaaagtcaccagctcccgcacagtcagcttcatctggatgttattggactgggtcaggatggcaaggcgcttggagagctccttacttttccatttgccgatgtccctgccctcaaagtctaccagaccgctgtcgtgggcgatgagccgggagatcatgcccatgacggtggatttgcccgcaccgttgggaccaatcagggaaatcaccttgcccttgggaatggcgaagctcacgccgtctaccacggttttaccgtcatactgtttggtcaattcttgaattcgcacgattacaccttctttctggtcaggaggagatagaggaagtaaaggccgccgcccacagtgatgaatacgctcaccggcacggagtaggaatacacatgctccacaatgagctgtccgcccaccagcacgatcatgccgaacagggccgagcccagcaccagctgggtgtgccggaaggtcttgagcagctgacgggacaggttggcaatgatgagccccaaaaaggagatgggacctaccatggcagtggccacggcaatgcagagggtcacccccagcagcaggcggcggatgcagcggtcgtagtccacccccaggttgatggcctgctccttgcccagggtcagcacgtccagcagagccagttcttttctcaacgcgaagatgacagctgccaggaggatcagggaaaagacgatgatctcggaattgacgttgctgaagctggccaccagagtattgagcaggctgtcgtactcattagggtccatcacccgggtcagagtcgtttggacactgctaaagaaggaggtcagcactgtgcccaccagtagcacatagagtacattgtgcttggtctttttgaagatccagctataaataatcgtggcggtaattcccatgagcaccacgtccactgcgaaggacagatttgcgttggatgcgatgatactggaggatcccaggaaaaacaccaccgccgtgtggatgagggtatacagggagttcatgcccagcaagcagggagtcacaatggtgttgttgatgatggactggaacaccagagaggccccgccgatggaaaaggcggtgatgagcatgacgatgagcttgggggtgcggatcttcatggcgtaggccaggagtttgggattggaaaagttgacgtccaccagcatatatcctgctgcacagagaagaacgatcgcagccaggatcaggagtttgcgccggttggcgcgcacggcagcggtgttcactgatccgcacctcctttcaggtcaggcacagcagagcagcagcctgtcccggcaccgcccaggcggacggccttccggccatgcttgagccggtagaacagcagacctataaagataaggcttcctaggatacccacgatcagttcgatgggcagctcgtagggggcgattacaatccggccgatcatgtcgcacaccagcacgaaaatggcgccgaacagagcggtgtccaccagcgtgccccggatcttgtcgcccttgtacatggacactacattgggcacgatgagaccgatgtaggagatggagccgaccaccaccacaatactggcggtgatcatggcggcaatggtgagcccggagaagagaaccagattgtacgggacccccaggtccttggaaaaatccttgcccagccccacgatgttgaagtggttggcaaaggcaaaagccaacaccaccagcgggactgtcagccagacgatctcataccggcctttcagcaccagggaaaagtggcctaccagccaggaggacagggcctgggtcatctcgtacttgtacgccagatagttggtgatgccgccgataacattgccgaacatgatgcccaccaatggaaccatcaccacatccttgaactggatgcgctgaatgaaccacacaaagatccaggtgcccaaaattgccgtggtaaaggcgaagagcgcgcggctccacagagtggaggccggtatgaacagcagcgccagcaggatgccgaactgggccgaggaaatggtggccccggtggttggggacacgaatttgttgctgcacaactgctgcatgataagccctgctacgctcatgccgactccggtacacaggatagccagcaggcgcggcagccgggagatcaggaagatctcaatctgctcgaagtttcctgccagcagctctgccggcgtcagattgatcacgcctacaaacagcgagcagcaggacaagacaagcaacagggccaaaagaaccatggtagaacgatacggtctgatacaatcctcccctttctttcatgcggttagttctagctaaccactttgcaaaaaggatgcgcagcggcgattggacttaccatgcatcacgcactgcgcatcgtgagtgtattatagcacacggagttagtcgcgtgcaaccacgcaaaaagcacaagctatcaagcggaaaggattctttttttatccattacgcgaattgttgcccagagcggactgcgtccgagcagtcagccggcccatgctccgcaggctgacgcccagggtggagagattgtgcagcgtggcagaggtggcgggcggcagaacaccggccacaccaagggcaatcagggtgccgttgaagccgataacgaagcggtagttggagtggatgcgcgccatcagcgccatggcgatccggcgcagctctaccagttcccagagattgtcggcagcgatggtgatgtccgcaatttcccgggcgatggcagccccgtcgctgatggcgatgcccgtgtccgcctcggacagggcaggcgagtcgttgatgccgtcgcccaccatcaggacagtatgcccctcccggcggagccgggccacatactcagctttgtccgccggaaggactccggcgcggaagtcgtccactcccacctgggcggcaatggccgcggcggtacggtaactgtcgccggtaagcatgacggtactggtgatccccagggcgcggagggcagataggacttccttcgcctcctcacgcagcgggtcggagatgcaaatcacagcggccagctgtccgcctatagccagatacaggtgagaatactccggcggaagcgcgtcaaagcgctcctgttcgccctctggaatgacgcagccctcatcctcaaacacgaagtgtgcgcttccgatcaggacccgctccccattgacggtgctggcgatgccgtgggccaccagatactccaccttggagtgatactcctcatggcgcaggccccggcgcttggcctcctccaccacggcgttggccatggagtgggggaagtgctcctccaggcaggccgccagccgcagcatttccgtttcctctttaccgccgaagggcaccacctgagtcacctgtggacaggcgtgggtcaaagtgccggtcttatcaaacacgatggtatcggcagcggctgccacctccaagaacttgccgcccttgacggtgatatgggcgcgccccgcctcccgcatggcggagaggacggccaggggcatcgccagcttcagggcgcaggagaagtccaccatcagcaccgacagagcccgtgtcacattccgggtgaggacgaagctcagcaggctcccggcgaaggtatagggcaccagcttgtccgccagattggcggccctgctctcagcctccgacttcatctgctccgactgctcgatcatgtggacgatctggtcatagcggctctggccggaggcctgtttgacctccagcacacattcgccctcctccaccacggtgccggcatagacggcgccgccgggtcgcttgggcacaggaatggactcgccggtgagggacgcctgattgacggtgacctccccctccagcaccagaccgtccacggggatgatgccgccggcgcggaccactacggcgtcccccggctggacctgggacacagggaccagcacttcgccctgggctgtgcgcagccagacccgatccacattcagggacatacaccgggccagatcggctacggatttctttcgtgtccactcctccagcagttcgccgatttccaaaaggaacatgaccattccggcggttccgaagtcccttcgacaggcggaaatggaaatggagagggcatccagcagctccaccttgacgcggcggcgcagcagacagtgcagccctcgccgtacaaaggggatcatgtgccagagaatgcgggcgatgcgaaggggcgatgggagaaagagcgtgcaggcggctttgcaaagaaccttgcccaccagcttctcctcaaattcccggttcagcgcccgactgctgtgggcgggcagcgatatggtctgctctgcctcccgccaggaaaagcgcagaatgtcatccagtacagcttggcggctgccgtcatagtacaggatgacgcagcaggtgcgctcatggacggtgacctgccggcaccaggaccttctctggagccatgtctccagaagatccgcctgtgccagcgtcatttgattctggcgtagctggaaccggatgcgcccccggctctcgtgcaatatggttgcgttcataggttcctccttcacgaaaagagggagccgctggcggctccctctgggtcaatcaggcttcttcgctttccagattggcagcggcggcttcctccgcttcctttgccgcccggtcctcgttcagctccttggcggaggccagaatgtctgcggcgttctcctgcaccgtggtcacggttcccatgaccgagtccttcatccgcaggccggcggccgtgacatggacataggccttcttggcgtccttgctggacagcagcttcacgccaaaagagccaaacaaagcgccgcccgcaaagcaggccagtttcgtataaagactcattgcaatacttcctttcccttatttccgcttgtagccggtgaccatgaccatgatcatacagatcacaacgccccaagcccaaaaacgatgctgtttcatcgccgtcactcctttgatcactttggaatgtctggatattatagcagaaaacaaagatggctgtcgctgtcaaaacagacgcagagttgcggtttccgacatttttctgtactggccgggggtcatgccatattcccgcttgaatgcggtattgaactggctcatgccctcatatcccacagactgcgcgatctgctggatgggcatccgggtggtgcagatcagctcctgcgcccgccgcaggcgctgccggatcaaataagtgtggatgggcacgccgtaggcgcggcgaaagccttcctttaagaaggttggggaaacggaaaactgcttgcagagcaggtcaatggtgagtttttcagacaggtgtgcctggatgtatgccttgatttccaacaggttgtgggatactgggcagcctgtaccggagggagctccatccgcttcttctgcctcggtgcaaagcaaatacaacagttctactgatttgaaaacacagtaacgctcctgtgcttcctcagacagctgacgcaccgtttcaaaaaacgcctgtgtccagggtgtaccgtgcagcgccatgcacccgcggcttgccgccatcttcctctgaacgactttggtattcaactccattcccagggcagaacaggctgtcataaggctttcttttgcggcttttgcgtctaccgccaccaggatgccgctcaggtttccgctgtactgacaggaatgaagctcggagctgtcagaaagcagaaagatctcccgagcctccaccacatagggcgcccctttcgaggtctgaaccgcaaggcggccggacagacagaaaagcacttcaaattggagcggtactccgcataccgggatggaccgtggagatccttgctccggctccggtaaggaaaaacggcaaagctgtacccccggcatacttctgctccagcatcctatattttgattgaacaaatgctctttcagcatgatttctcacgacctgtttctctgtgatcaaaccggctttgcctgcgctgtcctgggaacagagagaaggcgggagacaagcggcttgtctcctgccttctgcggtgtgtgttcgtcaggccagcgccgctcccagttcgcggcaggccgagagagcctcgtcgtcgggggtctcgttgcagatcacactatcgcagaccatattggccccagcgtcatcgcagcgtgattcccagcttctcatccactcgccgtcaccccagccataggagccgaacagggcgatattcttcccgctcaggcgtccttcacaggcagcgaacatgggctcgaattcgctctcctccagctgctccgcccccatggaggggcagccgaaggcgatggcgccgtagttgccgatctgctcctcggtaaactctgcggcggggatgacggatacctcagcccctttgcccttggcgccttcggccaccgtcatggccatggcctcggtgtttcccgtgccgctccaatacaccactgcaactttactcataagactcaacgacctttctttctggatttgttatggcagaaacatcaaccagctacggtgagctgctcgatggatttcccttgctgccactgccgagagtagattttgctgcacatctcgtatttctcaaagatgtttctggcggtctgctcgtcgccgtagaccttccagcagcccacgcacttgtgattgcacgccccattgcagatgaagcccagcacatcctccggcagatagctcaaaaacaggccgatctcatgggggaactctccagcggactgaagcctgcgcatcagctgcaccacacagcagtcaggcttctccggtgtgtaaccatacgccgccaatagttcccttgcgcgcagatcggtcaaatcgatctccagtgcattggggcggtaggcgtagatcaaagcgcgccctttgcgaaccctaagcggcagtacacggattcctctgggaaccagtttcctgttcagtcggcacaggtctttcgtcagctcctcccggctggagcaggcgcaggaaaagagatttcccgtcttgatcccggccagggtgggagaacaatggcgaatcagcagatcctctgacataggcgtttccctcacaaaatcatgtccacatgcggacagtgcggtgaaatatgtaatactgacaatttaagatgggttagcaaaagctaactaatgtgccgaaaagatagccaccgcccgttggttagtggtagctaactaatgcaattatatataggaccatttcgcttgtcaagaggatgtatggattttgctgacaaaaaaatggcgcttatcagatacctgtgttataataagcaaaacacccgtttcttatggaggttcccatggcaattcacgagtgtggccagatgtatctggaaaccatctatattctctctcaggacagcgcattcgttcgggctatcgatgtgggagaacagctgggctttaccaaacccagcgtcagcagagccatgtccattttgaaaaaggacgggtatgtgaatgtggacgctgacggtgcaatcatcctgacggagaccgggcttgccattgcaaagacgatgtacacccgccatacggtgttgagccagatgctgatggaactgggtgtggacgagaagactgcgaccgaggatgcctgccggatcgagcatgtaatcagcgagaaatcctttgcggcggtgcaggcgcacttggagcaggtaacgaaaatgcgggaggatgcgcacgggcaatgagtctatgcaaatttggcggactttgttatcgagcggcaacacgatatgtgaatacctgtcatttgcagagaatatcaaatgaggtggcgccttgatatggactccacctcatttttctgtgatctgcgcttttgaatcaggagcggcctgctgtgtgagttcaccgccaagcgcacctgctccatagctccaaccgctcacgacagatcacccttatgtggctgctgtcttttcaaaagatttcgggcggcttttttgatgttatagcacacgccaagaacggcgatgcagaatagcaaagccgctaatccatatccaaacgactgcattgccatgttcatgttcacgcctcttttctgactgctgcttctaaagaccgcagccaaacaatcctctttttttgtacggctccttctggatcgtgccgacctcataccctgtgctgcgaatggcgttcataacagtctccgtgtccagctctgtttcagagaggatcacggtctggtttttgctgcgggaggagtttacctttttgaccggacaggctttgcgcacagcgtcattgacatgagcctcgcacatcccgcacatcattccgttgacttccactgtgtacttccacataatttctcattcctccttgacttttatatgatcgagctgcgcggaccggacggcggtctgccgtgccgcagtccgttcatccgggatcttcctggccatcagacagcacagcggcgccaacgagtttccaagaagcggatggcgaacgatggagtagccgcactcggatagatatgctatcagctccccggcagtccagacatggtacacccgaaagcctgacagccccatgaaccagagccggagtctggcgcttcggcttttgccccagacaaaggtgggggcgaacagccatccccccggcttcaaaacccgccaggcttccgccagagccttttccgggtgaggcatgacatggagggcgttggagatcacgaccgcatcaaagctctccggcccgtagggcagcttggtggcgtcctggacggagaaatggagccgagacgaataaacctgctttttggcctgacggatcatttcagatgaaaagtcggttgcctcccaactccggacacatggcgacagcgggatggagagctgacctgttccgcaggccagctccagcacatccatatcccgtttcagaaaagggtgcattgctttgcagatctgctgataggtcgcctgagagcggcgcataaagccggcgtaatgccgtgaaaaccgctcccaaaactgcttgttgtcatccatgaaatatggtcacctcaacaacagttagtacttgctaactacatcatactctttgtcgcatgaaattgcaagatgccgccataacatctttctatcaatggatggccaatacttcaaacgaaacaatggtgtcatatcctaaaagctgatagccttgttatcacatgactgcggtgtgaaagccgtttgctatagtttattgcgctggaacgaaagcatgatctgatgcgaaaataacttgactggttagcgatagctaactataatcaaacacagagtacctcatcttttgaggagggcctatggagaagtataaaatcgagaaggactccgtgcaggagattcctatacggttcttggttgcatccgtcagccgctggcaaagctggccgacggacctatgtgcctccggagcatccggatagactttacagaaaaccactacggtaagattggaggagaatatgccgattgaattgtggaaagggctgctgatccccttcgctgggacagcgctgggcgcggcctgtgtcttttttatgcggaacagcttgagcgacctggttcagcgtgcgctcaccggctttgcggcgggtgtcatggtggcggcttccatctggagcctgctgctgcctgcgatggaacaggcggcagacatgggccggtggtcctttgtccccgccgtcgtgggtttctggctcggcatcctattcctgctggggttggatcgattgatcccccatctgcatcgtggcagttcggaggccgagggcgtcaaaagcagattgggaaaaacgaccatgctgacactggcggttgctctgcacaacatcccggaaggtatggcggtgggtgcggtttatgccgggtggctctatggggacagcgggatcacactggcgggggcactggctctttctctgggaattgccattcagaacttcccggagggcgcgatcatttccatgcccctgaaagcggaggggttctccaaatcccgttcctttctgtacggaacgctgtccggcgcagtggagccaataggcgccatcctgaccatccttctggctggtattttagtcccggtgctgccttacgccctaagctttgctgccggagcgatggtctatgtggtagtggaggaattgatcccggagatgtcggcgggaaaacactctaatgtgggaaccgttctgtttgcggtcggctttaccctcatgatgacgctggatgtggctctgggggcttaagtacaatgatatctaaccgatttctttccggcttgaaatacgagtaaatcatagcaataggagacatatgtatgaactggacgcgcgttgtcttggacgggtttgctatggcagcctattttaacctgtttgccgggttggtggcactgtatcaccctcgactgatgttcccatgttatccgccagccatcatcaaggcggcgaaagatccgcccaccagtgcggaaaaccgcttttactggctttggatctgttttggggagctgctgcctctcctgctttatggcgcggtcagtaccatggagagcgggacaacagggttctggcgtctggccctgaccgggtatatccaatggatgatggttaatttctgtgacttgttgtttttggatttctggctgattcagagaaaggcgaaaagccggtttatcaccccgggaactgaagggcaccccggctacgggttcaacgcctggatgaaagactacgctctgccggagcacttgctccagtggccgtttttgatgtgccctatcctggcggcggcccaggcagggctggggctgctcatcgatatgttttggtgaacagtaagaaaatgtgccgcataggtatttgttctcaaattgtcagatcggtagtcaagatgatggggatgcctttgggcaaaaactgcgggagatgggctatcagaatgtcagacgcatgggtaccccagaagaggcttttggtcccaccgccgggaggcaaggatgatactggtatcttccagacagcttgtcggcaggaagcaatccggaaaacaggagggatgttgttttgtcaaagttaggcgttctggaagacacgctgtttgtccccatgctgggcaggatctatgccagcgagtactgcccgcagatcctgtacgatccaaaggcgctggaactgaaaaagaaactgccttccgacctgcttgggaagggcggccagagccagtataccctgttggcctccgccgcccggtccgccaatgtagatcagttcatccggacctttctggagcgcagaccggacggtgtggtcgttcagctgggctacggtctggagacgacttattcccgctgcgataacgggcatacccgctggtatgctctggatatgccccatgtggtggagtaccggcgggcgctgctgtcggagccggagcgggagacctatctcgccggggatgcctttgccgaggactggatcaggcagatccgcgccgatgtgccggatgctcctattctggtcaccgccggaggcctgttccactattttgaggaaaacaaggttgtgggcctcctgcggatgctcacggggtttggagagattgaaatcgtctttgacaccgtgagcaaaagcggtatggccatgatgcggaaaaagtacatgaagcaggtgggccacagagatgcgcagatgtttttctatgtggattccgcgtcggagctgaccgggaaaattggcagtggggtcagggtgctggccgaggagccctattaccgccatatcccccgaaccggattgaagctgtctacaaaaatcagcatgtcggtttcggaccggttttggatggtcaagatggtccatctggcaaccgaatgatgccttcgccaaaagccgtccggagtgttccggtcggctttttttgagcggatatggccacaccctcttgacaaatcaccttgccggctttattataacgacgttatataacaccgttatatggaggcgcacatggaagaaaaatctaccgtcacactggagaaaatccaacaggccgccatggaggagttttccgagaaaggcttccagggggcctccctgcggcagatcgtgaagcaggccggtgtcaccaccggcgcactctatggctatttctccggcaaggaggcgctttttgcctccattgtggaacctcacgccgccgcgctgatgggccggtttatggaggcgcagacaacctttgccgaattgccggagggagagcagccgtcgcacatggggatggagtccagccagtgcgtccattggatggtggactacatctgcgaccacagggagccagtgaagctgcttttgtgtaaggcggaaggcaccagctacgagtgtttcgtacacaatatcgtggaaatcgaggtggaatacaccctccagtacctggaggtgctgcaccgcctggggtatgaatgtccaaagctggacgagcagctgtgccacatcatcgccagcgggatgttcaacggcatctttgaaatcgtcatccacgatatgcccaaggagcaggccatgcgttatgtggatcagctgcgggatttttacaccgccggatggctgaagctgatcggccagtcataaggcgcaccactttccagtaagatcggggcttgcccctttctttttacactatcagttagtaattgctaacctaaagggaggaatatttgtgaagcaaaagaaaccaagcagccttgcccgcatcctgggctatgcgggcgggcacaggaacctaacgatcctgggctgtatcctgtccgccctgtcggcggtgctggggctggcgccgtatctttgtgtctggctggtggccagaagcgtgctgtcagcctggcccagtctggacggggccggggatctgggccgctggggctggatggcggtgtggactgccgttggcagcatcctgctttactttgccgccctcatgtccacccatatcgcggccttccgcaccgcccggaacatccggcgcgccgccatgacccatgtactaaagctccccttgggctttttcaccgggaaccagtcggggcggctgcgcaagctcatcgacgacaacgccgggctcaccgaggacctgctggcccacaagctccccgacctggccgctacggcggtgacgcccatcgccgccatcgtggtgctgttcctttttgactggcgaatgggccttttgtgcctgctcaccatggtgctggccctgctgtccatgtgcatgatgatgggcggcaaaaacgccggcttcttccaccgctatcagcaggagatcgagcgcatgagcggcgaggcagtggagtatgtccggggcatcccggtggtgaagatgttccagcagacggtctactccttcaatgccttctacgccgccatccaggattacagcgacttggccagtcagtacgccatgagctgccggacgggccagacctgtttccttaccttcattaacggggccttcgccctgctgatcccggcggtgctgctcatcgcctccggcggggatgtgcgggccgcgctggtgaacctgatcttctacgccctgttcgcccctgcctgcggccagatgatcaaccgcatcatgtatatgagcgaggcggtgatggaggccgacgaggccattggccgcctggacgagatcctgagccagcagcccatggaggaaccgaaggtccaaaagagttttgccagcgacgccgtggcctttgaccatgtgaccttcacctaccccggcgcggaccggcccgcgctgaaggatgtgagtttctccgtccagcccggtgaagcggtagccctggtgggaccctccggtgggggcaagaccaccgccgccagcctgattccccggttctgggatgtggacagcggcagcgtcaccgtgggcggcgcggacgtgcgggagctggacagcaccgctctcatggggcaggtggcctttgtgttccaggatacccggctgttcaaggagagcttgctggagaatatccgggccgcccggccagacgcctcccgggatgaggtgctggccgccgcccacgctgcccagtgcgatgacatcctggaaaaactgccccagggactggacacggtggtgggtgccaggggcgtctatctctctggcggggagcagcagcgcatcgccctggcccgggccattttgaaggacgctcccattgtggtgctggacgaggccaccgcctttgccgacccggagaacgagcatcagatccaaaaggcctttgagaccctgatccggaataagacggtgctgatgatcgcccaccggctgtccacagtgcagaacgcggacaacatcatcgtcctcagcgagggaaagatcgcggagcagggcagccacagcgccctgctggagaaaagcggtgtctacgccgccatgtgggcggactatcagcgcagcgcccaatggaaggttaaggttggaaaggaggcagcagtatgacaaagaaattacagcacatcttcgctctcagtgagaagggggccagagacctggtgaaggccgtgatttggtgctttgtgtgcaatctggccctcatgttccccgtgggggcggtcctgttcacggtccagcatcttctgggctgcctggagagcagcggcagtcccatggacgggttctggctctatgtgggctttgccctggcggtgctcctcctgctgttcgtcctccactggttccagtacgcctccctttacatcgccacctaccaggagagcgccaaccgccgggtgagcctgtcggagacgctgcggagactccccctgtccttcttcggcaaccgggatctcagcgacctgacctccaccatgatcgccgactgctccagcctggatcagatgttctcccactatgtgccgcaactgttcgcctctatcggctccacgctggtaatcggggcgtgcatgttcgtgtgcgattggcgcatggccttggcggtgctgtgggtggtgcccgtggcggtggcgctgacagcgggaagtaagaagatccaggacgcctttgggacgaaaaatatcctgaacaaacgggcagtggccgattgcatccaggaggggttggagaccatccgggacatcaaggcctgccaccggcaggagcggtatctcgacggcctggaggcaaaactgtccgccatggagggcagctccatccgctccgagctggccaccggcgtgtttgtgtgctccgctcaggctttcctgcggctggggcttgccaccacggtgctcaccggcggggcgttgctgctggtcggggagctctccttcctctatttcctgggcttcctctttgccgctgcccggctgtacgatcctctgggggtggtgctccagaacatcgccgccaccttcaacaccaagctgcagattgaacggatgcgctccattctggagcagccggtgcagacggggacagaggacttctgcccatccagttacgacatcaccttcgaccacgtctcctttgcctaccgggagggcgcgggggtgctggaggatgtgagcttcaccgcccgccagggggaggtcaccgctctcatcggcccctccggcggcgggaagtccaccgcctgcaagctggccgcccggttctgggatgtcaccggcgggaaggtgtccctgggcggaacggacgtgtccacggtggacccggaggccctcctgcgctcctactccatggtgttccaggacgtggtgctgttccgggacacggtgatggagaacatccgcctgggccgccggagcgccaccgatgaggaggtgctggaagccgccaaggccgcccagtgcgacgagttcatccgcaagctgccccagggctaccagacggtgattggggagaacggttccaccctctccggcggggagcggcagcggatctccatcgcccgggccctgttgaaggacgcgccggtggtgctgctggatgaggccaccgccagcctggacgtggagaacgaaagcgccgtccagaccgccctcgcccgtcttcttcagggcaagacggtgctggtcatcgcccaccggatgcgcaccgtggccggtgcggatcatatcgtggtgctgaaggacggctgtgtggcacagcagggcaccccggcggagcttatggcgacgggaggcctgttccggcacatggtggaactccagagtgaaagtgcccagtggcagttgagataactgtgttttggtagttctaaagtaatcaagaactatattatgcagtattgctttaccataaaagaactgggcagtgcggaaatagatccgcactgcccagttctcatttacttttgtatggacgtctaccaaaacggcgattctgcatgccaagtagccgcaacgatctgtgctacagtgtttgtatgatatttaatgcttcttctgtggacagcttcccggccagataatcatctctggccttggccgcccggtccagccactggtagtactccccgtagcttaaatccttttcagacggttccttgttgataaactccgcccgctcatagcgtttatacatccgctgcttggcccggtcaaactcctctaccactctgagctgggcggctttctgccggtgcttgagcaccggcccccactccttgcaggtcttactgtccttcaggattcggtcacagtagagcgttttcttcttcgttttcgggataaaataccgcccacagcaatgacaccgcgcaacggaaggatggttcgtcacaaactgcagaagcagaaaatgataatagtccacagcggagcggaagtggtattgggtcgtcaaggtacttccatcccagcgcaggactgaacgcacagggacctcccacagcgtgtcatacttctcagaaacgattggttccccggcttgcacatcatgtaatacttcattgactacaaattggaactgcatgacctcagctaaaatggtaaggatattccggctggccaggaaaggatacatggcagtcccgtcatccgctggaacttcatcttccagctgtgtgcggagcaaggtcccatgcagagggaattcctcccccagagtagataccaggtcctccacggtgtcaagcatggcctgaaactcggtcatgtcggccagaccgccgtggtcatcatgcttcaggatcgccttggcctggaagcggatcaaatccaccaccaccgcatacggaccaaaacttaattcagaaaacaggattacctcatcggagatcgttgtaccttccagagagacttcgccggataccccggcgaggtctctctttatttctcccttctgcagcagttcgacatacgcgccatgttccgcactcattgactgccctcctctgtctcaaagtgaacttgtcttaaaacggtaaggatcacttgtagatttcgcagtgcccctttcttctgtattctaacagaaacggggaacaaaaccaaccgaccacaacagataggaggcattgataacatgaaactcaacacgatcgatggggcttttctgatgagccagcctctgcgtccgcccaacttcgtggtggacacgctgatcgctcaggggctgcatatcctggcgggctcgcccaaggtgggcaagtcctggctggccctgtggctggcggtgaccgtggccaagggtgaactcgtctgggggatgggcgtgaagcggggcactacgctctacctctgcctggaggactccgtccttcgcatccagaaccggctctttgagatcaccgaggacgcgccaagcagcgtccacttctgtacggagtgcgcgcccattggtcaggggctggaggagcaggtggaaatattcctcgccgcccatccagatacggtgctggtcatcatcgacacgctgcagatggtccgtccggtccacgacgccacctacgccaacgactatcgggacctgtctgtgctgaaacggctggcggacaagcacggcatcgccatcctgctcatccaccatctgcgcaaggagaaggcagacgatgtgttccaccggatctccggcaccaccgccatcagcggcgcggtggattccagcttcaccctggtggaagaaaaacgtggcagcggcagggcgaagctctcctgcgtgggccgggacatcgagtaccgggagcttgagctccagcgcggcagcgaaaatgtgtgggagctggtgtcggacagcgggacgcaggctgggcagccgggggagcagatcgtcacgctcctctctgccttcctgacggaccggaacaactttatcggcactcccacggagctctccgagcagatcgaccctgaccggagccggagcatcacgcccaagaaggtggctcggataatcctgcaaagcgttgacgctctaaacaaggccgggatcactgccgtggtgcgccgcagcaacggaaagcggctcattgagctacacagtgccgatcgtgtcgatttggagggtgccggaaaaatcgtccctatcgcccctgctgccgttgaccaaccgtctggagagggcgcgacgggggctgtggagacggattcctcccttttgggagggcaagcatcgcgtccggctatacgccggccaccgttccggggcgctgccccgaacccggcccctgcgggggaaaaggaggagccatgcagagagtaaaaaagagcgagatcatcaccctgcgggtgacgccccgtatcaagagaatcattcaggagcaggcaaaagccgctggcctgacggtcaccgattacctgtgctacagcggattgggaaaagaaatcgtgcgggtggacgggctggagcaggtgctcactgaactgaaggctcagggacgaaacctgaaccagctcaccactctggccaacatgggaaaggtcaccgtggtgtacggtgacaggtttgcggagagttaccagcagatcagcgagcagctccgtcagctcctgcgggaggtgacctaagatggcaacctttactgccgtcaagaaccggggcggaggccggggcgcgctgggcggagtgctgcgctacacccagcaggacgaaaaaacgctgtgggaaggacagcggctggtgtccggatggaactgcatcgctcagtctgtcctctccgagatgcagctcaccaaggagcggtttcgaaaaacggacgggcggcagtactaccacttcgtccagtccttcgcagagacggatgacctgacgccccagaaggcccacgccatcgctctggaactggcccaacgggagttccccaatttcgaggtgctggtcgctactcacatcgacacagaccatctgcacagtcacctcatcgtgaacagcgtcagcttccgggacggaaaaaagctccaccagagcgccgctgatctgcaagctcatcggaccgtcaacgatgagatctgcgctgcccacggtctggcgatcctgcctccgccggaaaagcaggtcaagcagaagcggatgagcagtcgggaatatcgctccgccgccaagggtgagagctggaagttccggctgatgaacaccatcgaccagtgtatgcggtacgcctccaccaaagaggagtttcgctccctgatggagagcgaggggtatcaggtgcgctggacggatggcaggaagaacatcacctacaccacaccgggcggcatgaagtgccgggacgaccggctccacgatataaagtacaccaaggaggtcatggaagatgaattccgaatccgggcagagattgtccgtggaagaactgaaacggctgaacctgccgccgcagtcagcccctatgctcccagcgcatccgccccagcaggagtggagcaaacagctggtacggctggagcgcctggaagccagcgccggcgcacaggaggccatgcttcgggcattgagccgacaggtggggcagctacccactcaggagcagttggagacactgtcgcgggaggtgggccagctgcgggcgacagtgcgacaggctgggaaaaggaaagagctctctatctcgccgcccagtttggatacggtgctgtctgtgctggcctggctgatcttgctcctgctggggactatggtgggcatggtggtcttgcggaccatctggtcctgcttggcctcagtctggaacgcggtcaaggtgctgatcccgtgatagacagtaccactatgcaccgccgctccgaccgcaagactttgcgcagagagcaggagaagaagatcgccctcggccataaggaagacgatcatgaggaagaacagacttggcagcagaccatgtaaaggagaacgaatacatgagttaccagcaggcgatgtatgaccgggatcatcccaggtactcggaaccaacagagtacattacgatggaggtggacggccttgtcgttgcactccgtttcaaaaacaccagtacgcagtctgacacggtgtccaagatcgaacagacgctgttgatgacacagaactttgaaaatctcaacgaatctgcttgattcagtagactttttcacctcggtgtgggatactgtgtgtgcatatgtaccttgacaatagaatcgaagcaaaccatatgcaccgcagtcctacatcagaaaggacaaggtgtgatcatggaaaaacagaaccgagtatactgcctctaccgtgtttcgaccaagggacaggtagacaaagatgatatccccatgcagaagcagcgctgccgtgagtttgcagagagccaggggtggacgatcctcaaagaatttgcggaaaagggtgtctcgggcttcaaggtagctgctgctgaccgcgatgccattcaggagatccgcaaggatgccgaggagcggaagtttgacatcctgctggtgttcatgttcgaccgcctggggcggcgggatgatgaaacacctttcgtggtggagtggttcatccgcaacggcattgaagtgtggagcgcaatggaagggcagcagaagatggatgaccacatcgacaagctgttgaactacatccgctattggcaggcatccggagagagtctcaagacctcggtgagaacgaagacctgcctgtcgcagatcgtgcaggaaggacgcttccggggtggcactgttccctatggataccgcttggaaaagcaggggcgcttcaataaaaagaaccacgaagtcaatgagatcctaatcgactcggacgaagcagcggtggtgcgcatcatctttgaaaatatgtctatgagggattcggcgcgcaacggttgtcccggtggctgtacagcaatggttacctcaaccgaaaagggacaaacttcgcaaataccaccatcatcaagatgctgaagaacattatgtatgtaggaatcttgcgcagcggggaaacgcgctcggagatctttccggaacttcagatcgttccgctggagctatatgagcatgcacagaagatcatggaggacaggacgatgcgccacaatgaggttcccttcaactccaaggagaaatccctgctctccgggatggtctattgtgctcacagcggttctaagttggtgctgaccaccagcagcggcagacgcgccaaaggtgagcctaagcgggagactcgtatccgctatgcctgccactacaagatccgccatcctcaggactgtgacggtcagaccggatattcaggtgagaaactggacggaattattgataagatcgtcattcaactctttgagcggatgagaaccgctcccaaaagtcagctgattcaaaggcagcgggagaaggaaattcagctggccaacagctctgtggcgaatttagaaaagctctatactgccacggaacgggaactggagagctacaaaaaggagatcatcaagaccatcaacggcaccggcagctttggcgcggatatccttggggaaatgattgaggaaacccggaacagactgactgctctgacacaggaattggaacaggccaaggagaaagcggctgatttgaaaaactctgctgttgcggtccaaaaggaatacgacaagatcatgtcctgggcggatctgtatgccggaagtagcattgaggggaaaaagatgatcctgcggcagttgatcgacagggtgaacatcggacgggattttgagattgaagtggaattcaagatcagcgtcacacaattcttcgacttcctgcatccggagggagacaagagtgtgtactatcgcgcatcctgaaagtatgaaaaaactcggcaaatctcaaaacgagatctcccgagtgtgtattgtgtggacaaaaaagatgcagttgcaaagcatttaccccaaaattccatatcttcattattgaccaaatcttataaatttattcaaagcattaggaacagtacacagttcatcacctccactttcaaaggcgcaaggatgtaactcaattctgaacttgaacttctgttctacaatggttaggggcacaatatgccttccatcgtttctggcagttactttatgagcatgcaatggtacagtcattttctatctctgtaacccccataacaatgcagtcgccaaatcatttttcgcatcgttcaaaacggaataactttatcgaagggatatgcctctgaaacaggattcaagagagattgactcttccatcaaatcctatatacagggcaacctcatcgcatattgaaaaaccggataccatatcaaatggcgaaagtgtattaaaggtgagccatgtattcatgctacataggggttcggattccgaaaatttcagttt

SEQ ID NO: 13518 - DNA, 21291 bp, Unknown
  gut microbiota DNA sequence
atcggcggaaggagcgggtctgggactagcccctacgctacgccgcaaatccaggaactgcgggcgggggcaggcccccccctgcaaaggactgagggagaactgtgcaccatacagggccccatgccccatcgggccgcacacccagacggggcagggcaccgttccccatgtagtacagagacccggccccgctccccatcatatctatcccctcaaaactgccagcaggcggagggctcacgcccttcgcctgccgctctttttcccatcacatgggcatgtcggtgcaccgccggtcacagcaccactgatggatcagcttgaccaccttctggtgctccgggtggtcccggtagaccaccagattttcctccttgtcgatctccgtgtacatgcacaggtcgcagttgctcagaccgatggggggctgaaacacctccagcctctccacgcagggcaccagatcccgcagtgcggtcatccgggccaccagggtctccgacgccgccctgcgctcctcctcactcagctcgggcttgaaattccaggacacgatatgacgtaccattggggccgcctcctcacagttgttgtaccccaattttactccctggcccccctgccgtcaattccgaattcccagctcccccgccgcgtccagcacctcaggcagcgccgccaccgccgaagtgatgcccagctcttgggccacctccagcttcttgcgcagggtgtccctgtcgtcaaagaggacgaagtgggccccgctctcccggctcatgtaggtgaagtagcgggcgcacagctcatgggagaagaacaccgaggggtgcagctgctccagcttctcctccagctcccgccggctcaggggcaccccgctccctgtgggggagggcagaaaaaagtcctccgccacccgctgcaccgccagggtcacccgctcccggccgaagcgctccgccgcctcctccagacgccgggacagcgagcctccggacagggccgacgggatcatcacccgggcccggggagaactgtgtccatagggctccgtcacatacaacgtccagccccggcgggcgaagccctcccccagccgccgcaccacctgatccagcagcggcaccccgccctgctcaaagtcgcacaccgcgccccggaagcccctggcggcgcactcccgcaccacctcatcacacaggggagcggcctcccctctgccgtcaaagcccacgcagtccagggccatcagtccgccttgagggaccggccccgccgccgcccggaagaggtggggcccccggccgatccggtagccctggtgggccggcacggcccgcagccccctcagctccccgatccgggccggcgggacggtgacgatcagcggttccatgctcatatctagctcccccttgtccattttctttggaaatgatataatgatatgatctcaacctcaacggagcggtccggcccgggcttccgcccggccccgccgcctcacacccccactctatgccgtcccgctccatcctagaacaccgacaggaggacgaccttcattgcgattctcacccattccccggggggtctaccccggtttttccgccctggacccagaggccctggccgccaggggtatccggctggtgctggctgacctagacaacactctggtcccctaccgggtcgcccagccctccccccagctgaccgcctggcgggacgccctggccgcccagggcatcgccctgttcatcctctccaacagccgcaagccgggccgggcccagaacttcgcccaggccctgggtgtgccctttcagggccgctcaggcaagccccgccgccgggggtatcttcaggccatggagcgcatgggctgcacccccgctcagacggtgatggtgggcgaccagatcttcaccgacactctgggggccaacaacgccggagttacccctttgctggtggaacccatccagctggcgggcaacccggggcgctatctccgctacgcggcggagacccccttccgcctgctgggcaaaaggaggcccttcctatgagtgccaaattcgggcccgccggcaacagcgacgctttctccgccgtccacaagtcctccctggccgccccccagtggatcgcggagcaggggctggactgctacgaatatcaatgcggcaagggggtccatgtgggggaggacaccgcccggagggtaggggagaacgcccggaagcacgggatctccctctctctccatgccccttatttcatcaatctggccaacccggacccggacagcctgcaaaagaccatcggctatatcacctccgcctgcctggtggccagtcagatgggggcctcccgggttgtgatccactccggcgccctgatgaagcgcacccgtcgggaggcgctggacacagccctccgctccctgagggaggtgatccggacctgcgacggccaaggcttcggccacatcgccctgtgtcccgagaccatgggcaagatcaaccaactgggagatctggaggaggtgctggagctgtgcaccctggacgagcgcttgatcccctgcatcgacttcggccacctgtacgcccgctcccttggggcggatgacggagcggaggccttcgggcggatgctggaccgggtggagtccgttctggggcagtccagggccagcgtctttcacagccatttctcccacatccagttcacccccggcgggggagaaaagtgccaccgcacctttgacgacgacgacggatacggccctgactgggctccgctggcccgggcgatcgcccgccggggctggtcccccactttcatctgcgagagcgccggcacgcaggccaaagatgcccttaccatgaagcgcatctaccaggaggtcctgactgcacagggataaggacgctcccgggaccccgatctcaaacatctttatattttcaggagagacccatatgcaccatacgcaggaacgggaacaaaagatccgcctctggctggacatgtggctgcggcgggaagacctgggtattctggagctctttgctcctgatgccgtttatcttgaaagctggggccccgagtaccacggcgccgccgccatccgtcactggttccaggagtggaacacccggggccgggtggaggtctgggacagcggccgcttcttccaccgggaggacgccaccattgtggagtggcgcttccgctgtgtgatgaacgacggcgcggtccagacctttgacggcctctctctggtggagtggacccaggagggcaccatccgccgtctccaggagttcggctgcaacctggacacctatgacccctaccggaacggagatccgcccatgttccgggaggaaagggccctctggttctgagggatccatgcctgatcacactgagaaacgaggttcaccatggaacttgaccgcgatctttttctcccggtctcccgggaggacatggcccgccggggctgggacttttacgactttctcctcatcaccggggatgcctatgtggatcacccctccttcggccccgccatcatcggccgggtactggaggcggagggctaccgggtggccgttctctcccagcccgactggcggcggccggaggccttctccgccctgggacgcccccggctgggggtgctgatctccggcgggaacctggactccatggtggcccactatacggcggcgaaaaagcgccgccacgatgacgcctactctcccggccggaaggcgggcctgcgccccgaccgggccactatcgtctactccaaccgggtgcgggaggtgttcggcgacatccccatcgtcatcggtgggctggaggccagcctgcgccgcttcgcccactacgactactgggaagacaaggtgcgccgctccatcctcttcgatgcccaggcggaccttctcacctacggcatgggggagaccgcctcccgggagatcgccgcccggctggcctccggcacaccggtgggggagatcaccgatgttcgcggcacatgcgccgccgtcccccaccccggcgcatgtgcctaccccttcgtggaggtcccctcctttgaggaggtgtccgcctccaaggaggcctacgcccgggccaacatggtggaatatgacgagcacgaccccttcgtgggaaaggccatccttcagaagcacgggcaccagttcctgctggtcaatccccccgcctatcccctgaccacggcggagctggatgcggtggccgagcttccctatgtacgggagccccatcccatgtacgactccatggggggcgtccccgccattgaggaggtgcgcttctccatcacccacaaccgggggtgctttggggcgtgcagcttctgctccctggcctttcaccaggggcgcaccatctccgcccgcagccaccagtctgttctccgggaggcagaggccctcacccgccaccccggcttcaagggctatatccacgacgtgggcggcccctctgccaccttccgccgtccctcctgccagaaacagctcaagcatggtatgtgcaggaaccgggcctgtctggcgccggagccctgccccaacctggacgccgaccacactgactatatgatgctcctgcgcaagctgcggcagctccccaaggtaaaaaaggtcttcatccgttccggcatccggttcgattttctgatgaaggaccccagcggcgagttcttcaccgacctgatccagcaccacatctccggccagctgaaggtggcgcccgagcactgctccgcccacaccctggactatatgggtaagccacacatccaggtctatgaaaagttccgggagaagtacttcaagctcaaccgccgctacggcaaggaccagtacctggtcccctacctcatctcctcccaccccggctgcaccctggaggatgcggtccagctggcggagtggctcaaccggcagggacacatgccggagcaggtgcaggacttctatcccacccccggcaccctgtccacctgcatgtggtacaccggcctggacccccgcaccatgcagccggtcttcgtcccccgcacgccccacgacaaggctctccagcgggcactgatgcagtggcgcaagccccaaaaccggaagctggtgttggaggctctccaccgcacgggccgtgaggatctgatcggttatgggaagcggtgcctgatccgtccggatgcccccgcctccggggcggggagccggcagggacgccggggggatgcccccgccaagcaggcccggggcagctccggccggaaggaggaccggcaaggcaggcaggccccatggaagggccgcccggccccggcagccggtggccgcgcctcccataccggccgccgggcaaagccggcgcaccagcggggcaagcggcctccaaagtaaaagaccgcgcggagagtgatctccgcgcggtcttttctcagcgttttatgggtcacatgtcccggtcagctgcgtttttcactgcctggccggcatcccgcagaccgttcccggcgtcgcgcaccacgtcgcccacgccgttcaccaagtcccgggtcccgtcagccacgccttttcccactcgctccatgtcccgggccgcattgccccggcccggtgccactctgccgtcggggaaggcggtatagcggccgtcataggtgtagccatggccgccggcggtcccgttcatcccgtagcgggtagaccggggataggcggtcccggcggcgctgccggtagtactgccggtagcgccgctgccggcgctccccttattctggtccgccggcgtgctgctgcacgcggtcagggtccccaccagggccagagccgcccccagggcgatcagctcttttttcattccaaatcctcccgttttccgttccagcccggccggtccggccggggctgtcaggtcccgcctggcacacgttccagacgggacctgatcccacacttttctcatacggaagttccatccgagctttattgtgcccacagcgttgccctttactgccggtaaatcggggcagacatggctgtgttttacaatttttttgcacagatcagtagcattatggggcagcgcagctcgtccgttatgctggtgagtccattttccctggcaaaatcaccggcccgcctggagacaggcgggccggtcaaacctcacagcgctctgtggagaatctccagcacctgttccagctgatccgccgggatctggccgggggcggagccttggcccaccatgccgaaggtggcggcggagccgaacacctcgccgcacaggcggctgatgacgccgtccgacgccatggacatggtcagcagcggccgctgggcgtacagccgatacatctcctcggtggcggagagcagggtcagcacgtccgccttgttctggggcatcacagccaccttcaggatgtcggcccccatatcctgcatcttccgcagccggtagatgagctcggcgtgctccggtgtccggtggaattcatggctggaccccaccaccgccgcgccggcatcatggatggcggcgatgttcttgcgcaccacctcgtcaccggaaaaaatctccacatccaccgcgtccacatagctcgactgggcgacggcccggttcaaagcggtgtagtcctccataccaatctccttttcgccgccctcccgcttggtgcggaaggtgaagaggatggggatctcccccagtgcctcgttcagctctctggcagtatccaccacccgctggacatcgcccacgccctggaagtagtccacccgccattccaccacatcgggcttggcctggaccagctcggcggctttgtccaggatctcctgctccgtcttcccaacaatggggacgatgatcttcggtctgcctgcaccgatctccaccccgcgcaacagtacggtctttgtcttcatcagttctcacccgctccttcttctgaatcggccagccccgccgggggccgctcttttggatcaacaggtgcattatagcagagcgccaggcggccgtccacccccgcgcgggagaggggacagatttttcttgacatttccgcctttcgcaggtatgattagttatacaagtattactttaaggagatttgggggatcaagatgtctgacaatgagaagtatatgagctccgtcaaggtgggaccgaaaggccaaatcgtcattcctaaggagatccgggacatgttccagatcagccccggggacaccctgctgatcctggccgacgcacaacggggcatcgccctggagcgctaccaagtctttgagcagatcgccgagtccatcttccaggggcggggccgggatatctatcctgaccacagcgagtcggagtccagggcttttgcccaggccatccggcagctgagcacaccggaagagcctgaggaacggtaagctctgccagggaaaggaggggacttcatgtaccgcatcgcctttttctccatctatgctcacgggcacaccaatcccactcttccggtggtacgggagctgacctgccgtgggcaccaggtccgctattactccttcgccccctttcgggagaagatccaggccgccggcgcccaattcgtcccctgcgactcctatctgccgccggcgcctccggatctggagcgaagggtgggccgcgacttcgccgccctggtggagatgatcacccaaaccctcctggccatggatggccccgtgggccgggatctggcccaattccagccccactgcgtggtatccgactccttgtgcttctggggaaagctgtgggccgccaagctggcctgcccctatgtctgctccaccaccaccttcgccttcaaccgccataccgccaagctgatgaagcagacgccggggcagttcctgcggctgcttgcgggtcggggccgcatccgccgctgcatggcccagctgtgccaggcgggctatccggtgaagggactgctctccctcattgagaacgacggatacaccgacaccatcgtctacacttcccgggaattccagcccctggccgacaccttttccagccggtatgcctttatcgggccctcggtgcccgagctgactcacgccccacgctccggcggggacaggcagatctacatctctctggggactgtcaacaaccgcagccgctccttttatcgcgcctgcctggaggccctgcggagctgggagggggtacgggccgttctctctctgggcggtgggtgcaggccggaagagctgggagatgttccgcccaatgtccaggtccttccccaggtagaccagctggccgtcctgtctcagtccgacgcctttctctcccactgcggcatgaacagcgtcagcgagagcctctacctgggggtccccctggtcctcttcccccagcaggaggagcagggcatggtggcccgccgggtccaggagttgggggcgggcgtcccgctgcccgctcccacccccgccgccatccatcaggccctctccctcgtcctggctgatcctgcctttcagcacagcgcccagcacatctctgaagggttccgcgccgccggcggctaccggcggggagcggataagattctggaagcggccatgggcagtgctcccctgccctgaacacctgtccggcggggcggagagaaaaacagcggcgtgacgaaatcgtcacgccgctgttttgtgctttcgggcagggagttactcctcgtctccctccaccgtgtcatccgacaggtccagagagaacttggtctggcagttggggcactctacctccccctccgccagcgccttgtcgtcgatgacgatgggttcctcgcaattggggcactcaacctcaaagtagtcgtcctcatcctcgtcctcgccgtagaccacggactccacatccgccaggtcgtcggaaatggtgtcgatctcctccccgagggccagagcgttctcctccaggtcctcgatggacagccccacttcctccaggatgccgatcatcacggagatgagcttgccctccttggacttctccacatccaggttcaggccctcagccagccccttcagataagcaactttctcggaaatagtcatagcagtttccctttctgaggctaagcctccttcaattctgtgtcgtaccctctgccccagtgtctctcccgacctgattttgttcttttcagcctctgcagaatctcatcgatacccatccccgctctctgcggggccggacatctgtctctgccatcagcccttgcagcgctccaggtactctccggtgcgggtgtcgatcttgatcttgtcaccagggttgatgaacaggggcaccttgatctcggcgccggtctccagggtggcgggcttggtcacgttggtggcggtgtcgcccttgaagccgggatcggtctcggtgacctccagctccacgaagttggggggctccacaccgaagacgctgcccttgtaggacatgaccttgcagctcatgttctccttcacgaacttgaaggcgtcgcccagcatatccttgctgatgggcagcatgtcgtaggtctccatgtccatgaaatagtacagatcgccgtcgttgtagctgtactccatgtccttgcgctccacgaaagcctgctcaaacttggcggtggggttgaaggaggtctcggtcacaccgccggtgatgatgttcttcatcttggtgcggacaaaggcggcgcccttgccgggcttgacgtgctggaactcgacgacctgcatgaccttgccgtccatctcaaaggtcacgccgttgcggaaatcactggcggaaatcattgccataggaatcatcctccaaatgtttttatgaactgatatattctaccctttttttctggatttgacaagaggttttctgtaaaatcacaggacgatcagctcttttggcgactttgtcaggtcacggcatcccgtttccgacaggacgatcacgtcctcgatgcgcacgccaaaacgcccgggcagatagatgcccggctcggcggagaccactgcccccacgggcatgatccgttcctcccccggcgcggcattgggggactcgtggatctccagtcccagggagtggccgaagctgtgggaaaatgcctccccataccccgccgcctggatcaccgtccggcctgcggcatcgatctcccgcccggccagcccggcccgggcggcggcgatgccagcctgctgggcctccagcaccacctgatatacccgctccatctccggtgcgggctttcccaccgccacggtgcgggtcatgtcggagcagtagcccctccacacacagccgaaatccatggtgacgaacatcccaggctggatcaccgtgtctccggggacggcatggggtttggagccattggcgccggcggccacgatagggtcgaaggagacccgctccccgccccggcgcagcagctcatacaccagccgggcggccacctcccgctccgtctgccccgggcggataaaattcaaaatcgcctgaaatgcctcgtcggtgatgcgctgggccgcctccatagcggccagctcctctccgtccttggacgcccgcaggccgtccggcaggtcctgagccgggaccagggtgcagggcagggccctctcataccgggccagggcgtccacactcacagccccgctctcaaagcccacccgcttcaggccgtgctcctggagatagccggcggccagggccagatggccccgctcccgggtcaccagctccacctgagccccctgcacctcctgccgggccgcctcgatgtagcggctgtcggtggaatagtgggccccctcccgggtcaccagcaccaggccctccccgtggaagcccacggcgtaccgctccccggcctgactggcgagcagcatggcgtccagctgatggtccgccagttttcccgcgatctgggcaatatggtccatcccatgtccctccttttgaacggccgcagctcagcggtcatagccgatgtacttctccaggatatccagcggcacccggctcccctgctcctcgccgatcttatagaagccgtaccgctgataaaagtgctgggcgggggtgttgtagctggcacagcgcaggcgcagatactgccgccccagggggcggtagaaggacaccgcctgcccgatgagctgcacccccagcccctgggcccgcagctggggcacaatgtagcagaatgggatatagccggccccgtccttggcataccgctctgggtccagctggatcagccccgccatccggtcccccgccatggcgcaggtcaccccccatggggtgcggccgcagtgaaggcgggcatcctgaagaaagctctccccatcaaagggggtgtcctctccgtggacggtgatccatgcctcccgccgggcctcgtaataggtctggctctcccgctccaagtccaggggccggaaccacaggttcacgtcctccgcccgcttcccgtccctccgccaccaggactggcgggccagtgtggagatagcggggtccaggtgggagttgtccccctcgaaggccagctggaacgccgctccgtcccacttcaggcaggagacggcggtgttgtcgctgtggcgcaggccgtgccactcctccggcgggatgcccttgatccgcgccagagcctgccggatggcggtgccgtggctgaacaccgccaccgtctggtccgggtgggcggcggcgatgcggcgcagggcccgctccacccgctcccccagctcccccagcccctctccacggggggccgtccaagtggggtcgctgcggttgaagcggtccagctccccgggctgggtgcggcgcacctggccccaggtctggtcctcccagtcccccatgttcagctcccgcagctccgggtcggtacgcagttccaggcccctgggctcatagacagcccgggccgtggtgcaggtgcggtacaggtcgctggaccacaccgcgtcgaagtgctccccctggaagcgctgctccagggcctggatctgcctgagaccgttctcggtcaccagggcgtcgtaccagccgtggatgcggcggtacaggtttccctccgcctcagcgtggcggatcagatagatggtcgtcatattcggtattccttcttttgagtttcgcggcacgccccaccggggctccgcctgccgcgtatccttaccagggcttcactccgccgatgagctccgccgcccgctccaggccttggccggccgccagggcggccagctcgtcccgcacccggatcggggcgtaggggtcagcaaagagggcggtgcccaccgccacggcggaggccccggccagcatcatctgggccgcgtcctcccccttggacaccccgcccatccccaggatgggcaggtccaccgcctgggccacctcccagaccatccgcaccgccacaggcaggacggcggggccggacaggccgccggtgttcatcttcagcacagggcgccgggtgttcacgtcgatgcgcatcccccgcagggtgttgatgagcgagagagcgtccgcccccgccccggccaccgcccgggcgatctccgtgatgtccgtcacattgggtgagagcttcaccatcactgggaccgagccggcgtgagccttggccacctgggtgacttcggcggccagttccggcctggtgccgtaggccagtccccccgccttcacattggggcaggagatgttcacctcgatcaggtccaccccggcctgggccagcttttcacacatgatgccgtattcctcgggggtgttcccagagatgttggcgatcaccttcacgtcatactgccgcaggaaggggagctccgtctccacaaaggcgtccacccccgggttctggaggcccaccgagttgagaatgcccatgggagtctctgcgattcgggggcccgggttgccctcccggcggtggagggtcaggcccttggcgcagatggcgcccagttcgcccaggtcatagaacgccccgtactcccggccgaagccgaaggtcccagaggccacgcacaccgggtttttcagagtcaccccagccagctccaccctcatatccacatcaggcatcccaatccacctccctggcttcaaagacgggtccgtccttgcacacatgtttccggctgccgtccgccatgtcgcaggcacagaccaggcaggcgcctacgccgcagcccatccgctcctccatggacaccaggcagcgcacgccgaagtcctccgccgcccgggccacgtttctcagcatgggtcgggggccgcaggccagcaccgcgtcatagccccggtctccctccagctcccgccgcaccagcgcatccacatagccgtggaagccgtaggagccgtcatctgtggccacctgcacctgggagcacacggagcggaactgctcctccagcatcaccctgtccccggagcggaaccccaggatggcggtgcaccgcccgggggcatactgggcgcagcccagcatggggggcacgccgatgccgccccccaccagcagatagcggccctcccgctctatggggaagccgttgcccagcaggcccatcacgtccaggctctgtccctcacggcggccggccagccaggcggtcccctctccccggacctcaaagaccacggtcagccggtcgggggcgtccccctcccccgcctgacaggcgcagacggagatgggccgacggagcagccgggaatgtccgcacttgatgtggacgaactgccccggggcccggaaggcggtccggaccatgtcccccacctccagagtgaggctgatggcggcgtcattgagcatcgtcctgctgatgatgccgcatttctgttctactttcattatggcgtcacaccctctgtggaaagtttagtgtctcgcgggcacacctggggcggcccttattggacccattccgggtcaaaaaatttcagccggccgcagacctcgcagcggaacaccgccattttcatgctgcctgacagcagatggtccaggtcaccgcccaaaaaggtgtgctcccccagctgaaaggtggatacccccagcttggtcatgtcctggccgcagcagcgggcggtctttttcacctgggcctggcgctgctcctcctgctgccggcgctcccgcgcctgctccagctcccgctgccactggacccgggcctgggggaggcgctcccgcacctcctccccctctctcaggtgaggggaccgggccatatactccctgagggcgatcttctcctcccccgccgcatcccggtatcgccgcatgcacttctcgcacagggtctgactggtgccgcacagggtgatgtagcacagggaccagcttcccgccatctctccgcagagcacacaggcccgctttgccatagtccttcctccttcccccagccccgcccttttgcgggagctgttacacgatggtgacgaagcgcctgatgtcgtcccgcatggcgatggccgcatcccgggccgcctgggcaaaatcccggccgtccccgccggtcttctgccacgcacacatgatgccccgggaggagttgacgatggccccgtggccgtacttgtcaaaggcatactgtacgtcctccgcagtccccccctgggcgccgtagccgggcaccaggaagaaggtgtgctccaggcgcttgcgcagggcccggatgtcggaggggtaggtggccccggtgacggccccagccatggtatagccgtacttgccctcggtccccttagcgatccgctgattcaggtcgcccatcacctgatagaccagccggtccccagccaccatatcctggagctctccggagccgggattggaggtcttgaccagcacgaagacacacttgtcctccccctgagctgccttcaggaaggggttgatagagtcagagcccatataaccgttgagggtgacgcagtcggcgtcaaaggtcttgaaggtctcctccccgatcttcaccccggacagccagccttccgcgtaggcggaggcggtggaaccgatgtctccccgcttgatgtcggcgatgacgaacagccccttgcttttggcatagcggatggtgcgctccagcatctccatcccccgccagcccagattttcatagtaggcggactgtggcttcactgcggggacgatgtcgcacagggcgtcgatcagccccacgttgaactgatagatggcctcacaggctccctccagcccggtgccgtgctccgcgaaggcggcctggcggatgtgctcgggcacatagtcgatccgggcgtccagcccggccactgtagggttcttcatggcccggatcttgtcctggagaacgtcaaaagacatcaaatatcattccttttcgttattttcatctttatttctactatttgttttgcattttgggggcctggcccctcttccggccggtctcaccagcttcccggatactgacagcggatattatatgcggccaggccccccgccacagtcaccaacagggacagcagaaaggccggcatgagctccagcagagaggctggcatgatgagcccccctgtgatgatctgaatgggcccgatccgccgctgatactctttcctccacggggcctcccgcaccgaccgtttcagccgccagggccatcccagcaggtctgtgatcccccagaagacccaggtctctccccaaaagaaggccgcgatcagtcctgggagagggatatatcccagccggatcagctgggccgatgcccctatgatcaggagattccccatcacaaaaaacagcgtcggcacccagctgggcacgctcctccgcgtcttcatgccgatcccacccttctgctccccctccgccgcaggccggctctcagggggcctcgtagatgaccgttccgcccacgatggtgtacttcacccgcccctttaccttccatccggcgaagggggtgttgcgccccttggatgcaaactgctccgggtctaccgtccactcttcgttcgggtcgaagatgacgatgtccgcgtcatttcccagagccagccgtcccttcgacagccccaggatagaggcggggttcaccgtcatccggcggacgatctccgtcagctccatctttccggtgtgatacagggcggtcagggtgactgccagggaggtctccagcccaaccatgccgctgggcgcccgggtgaggggcctggccttctcctcggcggagtggggggcgtggtcggtggcgatggcgtcgatggtgccgtcccgcaggccggcgatgatccccttcacatcctgctgtgtccgcagggggggattgatcctggccagggacccctgcgtcaggatctcgtcctctgtgagggtaaaatactgggggcaggtctcgcaggtaacgggcaccccgtgctccttcatccggcgcacgatgtccaccgcctttgccgtcgagatatggcagatgtggacccgggcgccggtctcctccgccagcatggccgcgcgcatcacctccagctcctcagcgatggcgggccgtccctccagccagagctggcgggatacgctgccctcgttcaccgcccggccctccaccatggaggtgtcctcacagtggcagaggacaggcagctcctgccgcttggcccttatcatggcgtcccgcatcaggttggcgttgtccacgttgcagccgtcatcggagagggccaccgcccccgcctttttcagcgcctctgcgtcggtgggctcctcccctctcagccccacggacaccgccgcgatggggtagacgtggacgccgctcccctccttggcccgctcccgcacatagtgcagctgctccgggcagtccagcaccgggtccgtgttggccatacaggccagggaggtgacccctccccgggccgccgcagccgtgccggtgcggatgtcctctttataggtgtaccccgggtcccgcaggtgtacgtgcatgtccaccaggcccgggctcaccaccagccccgaggcgtcgatgatccggtccgcctccgtctccagaccccgctccagcagggccacccggccgttttccgccagcaggtcggtcagcgtcacggtcttgctcaccgggtccaggacccttccgttctgaatcagtaatttcatgtcaaactcctccggggaccgcggggggaatgcccgggcaccactgtcagcttttctctgtgttgtatgcccctgcggtccggcccaggtcctccttctcagctccactgcctcagaccggagcctgccgcatctcgataccggctttattatagcgaaaccagcaggatttagcaacggatttttcccgcttttggggaagaatagcgtatgaccgaaacgcccgtccacggtgcgttttggaaaaaaggaggaatggatatgagcagcggacaattttggtggggcatgaccactggactggtggccggcgccgtcgtgggcatgagcgtggcaccctcccgccgggagatgaaaaagaccgcccacaaggtggccaagcatgtcaatgaggccgtggaggatctgaccgaggccctgggcatgtgaccctcccatcaaggcagctcccgccgcgggcagaccgtggcgggagctgtcttgatgccgttgtttccgcccaggctcacagccgcaccggcaccggccggccgggcagcagctcctccggcgtcacccggcactccatggccagcacctccacgccggcctctgccgcgtggcgcagggccgccccaaaggcggggtgggtccggtcgttaggctcgaaccatgagacgttctccatctgaataacaaagcacaccgccgttcggtatcccgcccggcgggcctcctccagctcctgaaggtgctttaccccccgcagcgtgggggcatcggggaagcggaccaccccgtcctcctccaatgtgacccctttcacctccacaaatccccgctctgctgaagactcccagtagaaatcgaatctagaattcctatatgtagtctccggacgcagcagagacagctccggaaggaatcctccgccccgggcccactcctcgaacacccggttgggggcctgagcgtccatattgatgagtcttgtccccttctccactgcgatcaggtcatattgggtctttcgggccgggttcccgctctcctccagatagaccttcgcgccagggaccagcagttcacggcacctgcctgtatttttcacgtggcacacagccgccgtaccgcccagctccacatgagccacgaaccggtttggccggtccaggaaggtcccgggccgtatcttttcatatttcatcttgccgctcctgtctttatcatggtatgatagggacggaccgccggcatcccgccgcccgtcacaacgaggaaatggagtctcccgatgcagaagaaagcttacctctctattatttccgccgccgccctctggggctgcatcggtgtatttctccgtctgctcaccgccgcgggcctggactccatggagtcggtggcagtacgcagcacggtggctgccatcctttactttttctggctgctcttcactgaccgggccgccgtccgggtacgcctgcaagatctctggtactttgtggggaccggcatcttcagcgtgctctttttcaactggtgctacttcaatgccatctcactcagtgccctgtccgtggccgccgtcctgctgtacacctctcccgtctttgtgatgctgctctctgcgctctgcttccaggaacctatcaccccccgcaagatcggcgccctcctgctcaccttctgcggctgtgtgctggtggccggcctgtttcccgccggggtggggagcatctctgccgccgcggtgcttttcggcctgggttccggcttcggctatgccctgtacagcattttcagtaaactggccctgaaacggtactccccctccaccatcaccttctatacttttctgttctccgctctgggctccctgcccctgtctcgtttatgggaggacgcctccctccttttagaccccagggccatcctgggcggtcttggcataggcgtcttgtgctgcatcctgccctatctgctctatacggagggcctgcgctgggcagagcccggcaaggccgctattctggccactgtggagccctttgtggccgccctcatcggtattttcgcgtttcatgaggcagtcaccccctataagctgctgggtatggccgccatcttcggggcgatcctgatcctgaaccgccgtccctaaaccggcccgtcactttgtctgtccaccttacgcgagcaagggcggctcctatgggagccgcccttcttttatgctctcttctccggcccgcttacagcttgacgaatttgtcccgattggcccggcagatgggacattgatacccctcgggcagggtctccttctcagccacatagccgcagatggtacacttccagccctcattgccctccagggtgcggtacacggtagcggccggaggcgtggagcccccgccgttcttgaagtcatccaccgtcagggcagggccttcgcccaaggtctccgcctcggcagcctctccgatataaagcatataggtccccaaatccagcttttccacgatcttgcagctgatccgggccagggcgtggtccttcacataggggttgcccgcctcatcggtctggacatcaaagccctcaaatttgtccaccacccggccggacttgtagccaaacaggtccaccagatccttgggagtatctttggccaagacagtggcggcaaagctgcccgcggcctcgatggtcttgaaggtctcattgctcttattgaccgtcaacgagaatttgtaggggctggaagaggtcacctgatgcagggagttgacgatgcacccattgcgcttcccatcggcggcagccgccacgatgaatagtccataattgatccggttaaacgcctttcgattcataatattccctccgcactcatcactcatttaataggaatcattcctgttatttccttcagtatatcatattttgcccctttgtcaaggaaaaaacacagttaaaaataaaaacgaggagcagataaaactgctcctcgtctgtgtaggcactacctattttcccagcccgtctccaggcaagtatcttcggcagaagcgagcttaacttccgtgttcggaatgggaacgggtggaccctcgctctaatcagcacctactttactttctccgaaaagaaagtaagcaaagaaaagttcttgcgccttttctctccttaccgtcttcccaacagtaagtattatatccgctatttttgatttgtcaagagaaatttggtgacccgtacgggaatcgaacccatgtttgcggcgtgagaggccgccgtcttaaccgcttgaccaacgggccatcgtcgctcctctttcagcagtccccgcccaggacgcacccagcgtcctggacaggaccacttggtgcaccttcacggattcgaaccggggacccactgattaagagtcagttgctctaccaactgagctaaaggtgcatctcctgcgccttcaaaaccgaacagtgaaactcgcttttccttcgctcacaagcgcctgcattcttcttccctgaccttaaggtcaagccctcggcttattagtatcggtcagctacatgcctcgcagcacttccacctccgacctatcaacgacatagtctacgtcgagccttactccataaaggatgagagatctaatcttagggagagtttcacgcttagatgctttcagcgtttatctcgtccagacgtagctacccagctgtgcccttggcaggacaactggtgcaccagaggtctgtccatcccggtcctctcgtactaaggacagctcccttcaaatctcttacgcccgcaacagatagggaccgaactgtctcacgacgttctgaacccagctcgcgtgccactttaatcggcgaacagccgaacccttgggaccgaattcagccccaggatgtgacgagccgacatcgaggtgccaaacctccccgtcgctgtggacgcttgggggagat

SEQ ID NO: 13519 - DNA, 3106 bp, Unknown
  gut microbiota DNA sequence
aggttctgcggatgggagagcggcacgacctgggggagctggccggcaccctggccgccgcgggctacacccgctgcgagcaggtggagggcgtgggccagttcgccctgcgggggggcatcctggactttttctccccggcccaccccaagcccgtccgggtggagttcttcggggacgagatcgacgccatgggcctcttcgatcccgacacccagcggcgcatcgagaatctcggcgcggcggagatcctgccggcggcggaggtgctgccccagtttacccctggcgggtacggcgggctgctggaggggctggaccgtctcatttcccaggcaaagcgccgcaaggggagcgagacactggtgcagacgctggaggaggaccgggagcggctggcggccagcacggccttcccggccatggaccgctacatcgccctgatctaccccgtcatggccacggcggcggattacttccccgaggacgcggtggtggtgctcagcgagagcccccgggtggccgagcggggaaagagctacctgtggcagttgggagaggacgccaaggccctgatggagcggggagagctggccggggagctggctgacttcgcccgcacctttgaggagctgaccgaggtgttggccgactggccggtctgctacctggacgccttcacctcctcccggtacccccagcggccccgcaccctgctcaacctgctgaccaagcagctcccctcttacggcgccagcctggagaccgccgtctccgacctggcccactatgtctccgacggattccgcaccgtggtactggtgagcagcgagcagcgtgccctcaacctccaggccctcctgcgggagcagaagatgaccaccgccgtggatttccagctccacgagctgcccggctacggcaaggcggtgattgccgtgggggggctcaccgccggcatggagtacccggtggggcgcttcgccgtgctcaccgaggggcagtccctgctgggcaaaaagcgcaggagcaagccggtgaccaaccggcagaagctgggctcctacgccgacctgtctcccggcgacctggtggtacacgagcaccacggcgtgggccgcttcctggagatgaccaagatgacggtggacggggtgcagaaggactacgtcaagatcgcctacgccggggccgacgtgctctacgtccccgccacccagctcgacctggtgagcaagtacatcggctccggggaggacgcccaggagacccgcaagctctccaggctggggggcaccgactgggagaaggccaagacccgggccaagaaggccgtcaaggatctggccaaggggctcattcagctctatgccgagcggcagcgccagcccggcttcgccttctcccccgattccccctggatgaaggagtttgaggacgagttcgagtacgccgaaaccgacgatcagctccgctgcatcgccgagatcaagcaggatatggagcaggcccggcccatggaccggctgctgtgcggcgacgtgggctacggcaagacggaggtggccttccgggccatcatgaagtgtgtgctggacggcaaacaggccgccatcctggtgcccaccaccgtgctggcccggcagcactacctgacggctaagcagcgctttgccaagtacccggtggagatcgacgtggtcagccgcttccgcacccaggcccagatgaaggacaccctgcggcggctggagcaggggggcatcgatctgctcatcggcacccaccggctctttcagaaggacgtgaaatttaaggatttgggcctgctggtcattgacgaggagcagcgcttcggcgtccagcacaaggagaagctcaaggagctgtccaagcaggtggacgtgctcaccctctccgccacccccatcccccggacgctgaatatggccctctccggcatccgggacatgtccaccctggaggagccgcccatggaccgccagccggtgcagacctatgtgctggagcacgactggggggtgctctccgacgccatgcgccgggagctggagcggggcggccaggtgtactacctccacaaccgggtggagaccatcacccgcaccgccgcccgcatcaaggagatgctgggggaggacgcggccgtggcggtggcccacggcaagatgagccaggaggagctcaacgacgtgatgacccgcatgagcgacggcgaggtggacgtgctggtgtgcaccaccatcatcgaaacgggcatcgacatcgccaacgccaacaccctgatcattgaggacgccgaccacatgggcctggcccagctccaccagatccgcggccgggtaggccgctccacgcgcagggcttatgcctacctgacctaccgccggggcaaagtgctcaccgaggtggcctccaagcgcctgggggccatccgggagtttgccgagttcggctccggcttcaaaatcgccatgcgcgacctggagatccggggggcgggcaatgtgctggggccggagcagagcggattcctgctcagcgtgggctacgacatgtacctcaagctgctggaggaggcggtactggaggagcggggcgagaagccggagcgccccaccgagtgcgccgccgatctcagtgtggccgcctccatcccagaccgctatgtgccctcgccggagcagcggatggacctctaccgccgcattgccgccatccgctccgaggcggacgccgacgacgtgatggatgagctcatcgaccgctacggcgatccgccccgcacggtcaacaacctcatctccgttgcccttctccgcgccgatgccgcccggaacgggatctcccagatcgaccagaagggcgccaacctgaatttctatctggaccagttcgatctccagcgggtgagcgccctgtgcggcctggagaagtaccgctcccgcctgctcttctccgccggggagaggccctacctggccctgcggctcaaaaagggggaggacgccctgaaatttggccgcaggctggtggaggactatgcgaagaccgccccggatcagacagagggatagagcggggg

SEQ ID NO: 13520 - DNA, 137 bp, Unknown
  gut microbiota DNA sequence
tttggccgcaggctggtggaggactatgcgaagaccgccccggatcagacagagggatagagcgggggtggactccccctgccggcggcagccggcgccgcgtgtgcggcggagctgggcgggattcacttccgccc

SEQ ID NO: 13521 - DNA, 1320 bp, Unknown
  gut microbiota DNA sequence
atatacccctcgtagggggatttgttgagatccgccttcagcgcctccagcagctccccctcccaccgggtgagggccagctccagccgggtgagcatctcccggcggaaccggaggtgccgggtggccccgctgtcaaaataccgccgctgggcggccagtacatcctccatggcgctctccttcacagccgggcctccaccgccccggcgaaggactgaaaggcgttgggcacggcgtaatcccgctccagggcggcccggtcggcccacacccacccctccggcagctccggcgaggcggcctccaagatttgggcggtcatgtgccactcgatatggctgaagatatgcttccccgccgggccgtcggataacccggccgcctccaccgggcagggggcgggggagagctcgttgggatactcccacaggcccgccagcaggccccttcccggccgccgccgcagggccaccttcttttcccagaaaatcaggaacacggtccgggcctcgatgcgccgggccttttttgccgccttgacgggcagctccccggtgcgctcctcccgccgggcggtgcagaagtccgccgccgggcaccggtcgcacaggggcgcgccgttgggcaggcacaccgtggcccccagctccatgagggcctggttgaagtcgccgggggcgtccaccggaagcacggcctggagggcggcgcgcatccgggccttggtgtccggccgggcgatgtcgccgccgtctccgctgatgcgggccaccacccgcagcacgttgccgtccaccgccggaacggggacaccgaaggcgatggaggcgatggcccccgccgtgtactcccccacgccggacagggtgagaaggccctcataggtgtcggggaacgccccgccgaagtcctccgtcacctgacgggcggccttctggagattgcgggcgcggttgtagtagcctaggccctgccacagcttcatgagccggtcttcctccacggccgccagatcggccacggtgggcagggcctccatgaagcggcggtagtagtccagcaccgccgccacccgggtctgctggagcatgatctcgctgacccacacatggtagggggtgggatcgctccgccaggggagcacccgggcgttttcgcggtaccactggagcagggggatgggaagttggtcgagttgattcaaaacaggattcctccgggacctcttttttctctgacccggctattatataatgaagccaaacttttttcaagaaacgcaatgaaaacggcccgccggtttctctaataggcaga

SEQ ID NO: 13522 - DNA, 158 bp, Unknown
  gut microbiota DNA sequence
ttgaactccagggagtagatgatgccctggttctcgttgtagtacacacccagcagctcgttgtactgaacaggcacggccttggtcagggcgttgaacaccagctcagccacgttgtcgcgggtcagcccggcgttggcggtgagcttcaggtcgcc

SEQ ID NO: 13523 - DNA, 170 bp, Unknown
  gut microbiota DNA sequence
ggcatgttcgagggctacgaggacgggtccttcggccccgagaacgtagtcacccgcgccgagatggcggtcatcatctgcaccatgctgtatggcgccggtgtgaacgtcaaccagttcgcggagaccaatgtgttcaccgacgtccccgcctgggcgcagggctatgt

SEQ ID NO: 13524 - DNA, 157 bp, Unknown
  gut microbiota DNA sequence
ttcaccgacgtccccgcctgggcgcagggctatgtgaacctgtgctccagcctgggcatcgtggccggcgtgggcgacggcaagttcgaccccaacgccaccgtgaccaccgcgcaggccgtgctgatgctgtgccgcgccctgggctacttccaga

SEQ ID NO: 13525 - DNA, 145868 bp, Unknown
  gut microbiota DNA sequence
ctgaccgcaacccaatgtaagtggctgaggttgggagaggaggaacaagggatcatgaggtgtcgtcttttttgctgcagaaataaaaagacgcggccgcaaaggggactttgcgcccacatagacggcagctgcgaaaaatgtgcagtagctgtaagtctgcaccaaaaacaaaatcacaacccagcataagcggttgtgatttggagcgaggagcagcaggatgagtgcgcgatgagtggcgcgtaaattcccgaccgcaggccgggaattgtgcaggagcggctttgccgcccccaagcattcaaaggccgaaggggggaagccgcactctgggcggtgggccccaaaaagaagggcatgaccataggtcatgcccttcttttttggcggaggtgaagagattcgaactcttgcgccggcgaagccgacctaccggatttcgaatccggacccttcaaccacttgggtacacctccacagaacacagaccggtcccggtctgtcgcccagacgaaagaagccgcaggccgacggaggggcctctgtttcagatacacgccaaacgatccgggcggaagattcgcttattaaagataccaaaaaagcagagagaaatcaagaggggaggggaaagaaataaaaattgttccttctcagcctccgtgggattgacacgatgtgggaaaataaggtatgctaaaacaacagaacaaactagaaacgagggacaggaggggctgcggatggagatgcaggatatgctggctgaccggctcaagcagaagcgggcgctctctcacgcatccctggaggaatattcgaaggagctggggatcagcaagagcgcgctgcaaaaatacgaggccgggaccggaaatcctaccctagccacggtgcagacaatagcggaccaccttcacgagagcccggcccagctgctggggatgtacagcgaagaagagatggaggctgcgggcctgatgttccggaccctggagtggtccatggggctttcggaggggagccgcagggagctggcggtgctgttccgggaactgagccgtttcctgagcggcgagctgggaggggctcccgggcccccaaaagagcggaaggaagagcgatgacctctgggtgacgctcccctgccacggcaggacctgaacggaaaccgagaaaattggtgaactgctatccctcaatttttaccaggtcatagctggatttactgccgtcacctcgactggaggagctgcggcacgatacagcaggcagctccatcatagatgagaggggggctgcttcgcggccccccttgatgatttcaacgtcaggcctggtcataccatcaatggagcgattttgacagtttcaaggagttttgaatcaatggtaagagtgcttttgtctgccacggcagtatcttgaaaagtcccgaaaaagcctgatgtaccaatgattatgcggctcgaaaaggtgcttactgcaccacgactacaccatttttgaaagagccttggatgacactaaaatttagcaaccgtgaaacagatggcgtgacaatttaaaaaccaagcaatgcaattaggtttggtacatttaaaaatgaaaccggttccatctttgagaaaactcagacggagccggttttgtattttttttgactgtttcctgtaattatgaacccgtcaagttcgtacctgactcctcattcgcaatattaggtaaacgtgttctccattctttgagccattttagagttttttcggctccaggatggagctgggcatatttagcaagcaggaacagctgccactttgctcgtatataagcgtaatgccacttatcgtatgcatagtttttcagttccagctccgctgcccgttcaaaggttctccaatccacaagtttccctaatatctgtttttctacctcacccccgtataactgctcggcgctggtcagatacagatcaacggccgttttcagatttctttcatatttggaatcaattaagtacttttgaataccctccacggctttttgaagcacagcgtcccggatggttgagtcttcaatatatcgggaaagatccagttgtaaactgcactgtgagcattgttcattgtcgtacaaccaaaacaacgccgtgttccgttcttgctccgaacagtgcaaaagatcggctgccaggagcgataacaattgttggtataactgctcccattgctccctcgcatcggcgtccaaggtatgtttcgtacgtgtaaagaaagtaatttgacttaaaaaataggcggtctgtaacgatcttttttgcggagttagttgcgccaaagtgtccaaaacctgcttgttggacagttttccatctctgaatagggaaaacatccattgcgcacacaagagttgggtatacaatagttttgacttcgaagcagacaggaaaagccgttctgaccagggataaaacgacatgtgagccgccaaaatatcgaacatcagcggtgatctactgttatccaatagcaaaaggaacgccgcaggatccaactttaacattaggcgatagcttccatgaaaccacccgttttcccgataccaaatatgtcctgcctgatcgaatagaatatcaaaacctgctctgcttactgttgcccgatcatgaagcaaggcccataacgtgtattccggcgcgttgatgcctctttggtcatgcaccatacgccgctctttttcttcggcaaaatcagaaaaccacattagaaactcatctgcagctccatctatattttttaaggtttctgcaacatcttcaattgaccatcgaaacacattcgagcatagctctcccaagactcggcaaacgccctctttatcctgtccccaatgattccatacttccgtaaccgctacagacaggttctcctttggaatcgtgtttctgccattctcacaatattctgtccccagccactctttcaaaggtgatggagataacttctttttatcttgggccgtcggtttcactgtagaatcatacagaacatcacaaataatgcgctcttttggcggtttcttttcttggagcttagcatcaaacatctgagtcaaatattcgcatacttccagagctacctcatgctccagcggtgcaatgacaaaggggtagttctgtcccatcttgttcaaagaattgctcaacagaaatccgtcaatatgttggtcattatggaaccgcagcaaataccgatcatgaaacaccggtttgttccctcgcctcaaattgcgcactgacagccggccatggagcaattttgcattgctaaacaggaatttttcatactctttgcaaatatcggatgctttccctgtatccgggtcagtcatcccaaggcaggtaataatgtcaagctgcagattcgtgcgtggtattctagtcaataatttttctgcagctgagactgaaaaatatggatctgcaagaatgactctgtccacagtactatccgccagatacttacgtatttttagaaaactatcaatttctccatcttttcctgtattcggaataaatgctcccaaacaacgtgttttccgataatcggttaaaagcctccttcctgtttccaatgaggtgtcaatttctgtgtgaaagctgcttttaactgaaaccgtacgatcggttgtaacccgatcaactttttctattttttcttcgatctctctttttcggttggaagctgactgaagtaatttctttgtccaagcatctctgacatgatacgaagacgagtcaaaattcatctccagatttactccaagcatcattgataaatcacgggcgaaaagcaactctccggtttcaccatcccatatctgtactactaccctgctcatagattccttggccgtgaactccacagaactctcctccgcaggcagcagttttgtctgattgatcagccaccgcttacgatgttctgcagcgcaatttaccaccaattctcgggaaaacacctctgttttttgaatcgttactttctttaattccaactccttatgtgtcaagatcttaaaacctgtgcccaatggagctgactgatagtgttcaaagtttccgaagcgatgcccctgcgaagaaaaatcaatgccgcattcctcttggcaccactgtattaagtcctggacatctcggtacagttccttaccatctgtcccaaatgaatggaggatttcctgaaatagtgcttccttttgcacattccacaattccttcagatatgcgtattccacaaccggaccatgctgccttgaatgcgtatcattgaccagtaccatgggcctgataactaattggggagatttcatcgttatcttcgccatagacagagtgctttcctgtgtgaggcttttctcaaagatttccgcttcatgaaaaggtaaaatggctgtaagaacactttggtgtttttttgatatctctctctgcttccatgtcaaaaaaggctggtttgttggggaactgaatccgtaaagaagaacttcccccccagcagtagaaaacaaaagtaatttaataaagcgattttctccttgcattttttcatctccgttctctttcggatagccatgtacaatactttctttctacgacattataacatagatctccatgacacccattactacatcctcccttccagaaacgaaattcaccattttttgagagccttgctatgacaatcccaatatggcagatttaagagaagcggaaatatctttctaatgtaaaatgttcccgctggcgctaacagacaaaaagatgccggggcagccttggaaaaggttgccccggtatcttttcacatattttgtgctttatagttttcgccccatgtccacatggcgtccagaatgggcttcagactttttcccaaggctgtcaggctgtactccacccgcggcggaacttcggcatatactttgcggctaaccagccctttttcttccatatcccgcagctgggcggtgagaactttctgggaaacgctgccgatggactttttgagttctccgaaccgctttgttcccggcatgaggtcgcgcaggatcaggactttccatttatcaccaatcagcataagcgttgtttctaccggacaggcaggtaattctttcacttgctgcatagtagcactcctttccaatagtttctttttagtaactatagcacaataaagtgcttactttacaatagatacttacggaattattataatttcgcaagataaaaattgcaatccccaaaacccaaattccaatcaggaggtatttatgatgaatgacgtcgtaaagtttttgcaggaaaatcccgttcagtatctggccacggttggccgtgatggtaaggccaagtgccgccccttcatgttttccggcgagatggatggcaagctatggttttgcaccaacaaccagaaggacatctacaaggatatgcaggccaaccctaacatcgagatttctgtttccagcccggcttatgcgtggattcggctgaacggcgaggccgttttcgagaataatatggccgccaaggagatgtgcatccggaaccccatcgtcaaggggcagtacggcgaggccaccaaccccgtctttgaagtgttttatttgaaagatgtccatgcagtaatcgctgacttttccggcaatccgcccaaggagtacgacctgtaagtatcgtgcacacggttccccccggataaatctaggggaacctcttgattttgagaggcttcttatgcagacaaaagagtatctggaatacattgtggatcatatccactctaccgtttttgccaccgtggacagccaagggcggcccgtcacctgtgccatcgacctcatggactatgatgaaaacagcctctactttctgacagcaaagggcaagaacttttatgaccggctaaaagctaacgaaaatattgccttcaccgccatgaagggagaagataccctttcctgcgtggcggtgtccgtacagggcaaggcaaaggagatcgggccggacaggctgcccgacttgttccgtaaaaatccctatatggagaagatttatcctgatgtgcgctcccacagcgcgctcacagtattcaaaatttacgagggaaccggagaatggtttgacctctccaaacttcctattgaacgggccagcttctttttcggcggagcacaggcaaaagagaccggctattttgtgacggacaaatgtattggctgcaagctgtgttattccaaatgtccgcagaagtgtatcgacatttcaagaaagcctgtggttattcggcaagaacactgtctgcattgcggaaattgctttgaaatatgccctgcaagggcgattgaacggagataagatgatgacgcaggacgagcgattgatttttctgctccgcgatctgctggcagaacgaaaagaatatgaagatatcccggtgccggattctctctcggaaaagcggcggcttttgcgcagcctgatgaatgtgcgtccgcccgtcccggtccgtgaggatttcttgcgggtgcaggacgcttaccttgtggatcgtctcgcggagcggggcatgacaaggctgaaagacctgacgccggtgcgtcccggcttatatctctggcagggagatatcactacgctggcagtggatgccatcgtcaacgcggccaacagccagatgctgggctgcttcgttccttgtcacggctgcatcgacaacgctatccacacctatgcaggggtgcagctccgcttggagtgtgcccgactcatgaccggacaggaggaagaacctaccggcaacgcaaaaatcacaaaggcttacaacctgccctgccgctatatactgcataccgtcggtccgataattagtggagccgtcacacaggcaaaccgggaactgctggccagctgctaccgcacctgtttggagctggcggcggaaactgggcttggcagcatagagttctgctgtatctctaccggtgaattccattttcccaatgaactggccgcagaaatagccatacaaacggtgggagaattgcaacggcaaaccccagacaaaatcaaggtgatcttcaatgttttcaagaacagagactatgaaatctacaagcgcctgctgcgataatatcgcacggctcaaacaggaattggacacggcggatgcggtggtgatcggggccggttccgggctttccacttccgcggggtttacctataccggcgaacgctttcagaaatatttcggggactttattgcgaagtatggcttccgcgatatgtattcaggcggcttctatccctttgacagcctggaagaacattgggcgtattggagcaggtatatctatatcaatcgctatttggacgccccgaagccagtttatcaggagcttttgaaactggtgcaaggaaaggactattttgtgctgaccaccaatgtggatcattgtttccagaaggcaggatttgacaagcagcggttgttctatacccagggcgactacggcctgtggcagtgttccaggccctgccaccaaaagacctatgataacgaaaccattgtcaaaaagatggtggccgaacaaaaggatcgaaaaatctccagcgaactgataccctgctgtccagtctgcggcgcacccatgtccatgaatctgcgggcggatgatacctttgtggaggatgaaggctggcacaccgccgcccggcggtatgaggactttctccaccgccatgagggacagcatattctctttctggaattgggcgtaggcggcaatacaccggtcatcatcaaatatccgttttggagaatgacctatcaaaacgccaaggcaacttacgcatgtatcaatttgatggaggcatactgcccgaaagaaattcaaaagcaagcaatttgcatcggtggagacatagaaaatattttacaccaattatttccacacaggaaatagcaaagccagccgagccagtcaacggtcaagatgaacgggctgcgcccgccgttgacagccccgcccgccttggctggtaggcaatcaaggggcgacagcaaggtatgctgccgccccgcactcttattcagagaggggggaatttacatgaccgagattgaagcctatcaagagtatatccggtgcaggcacaacgccttttgtaaagcagttattcggtatgccgccatcgggaaaatcatacggctgcggcagaaataggaacgggaaatttcccttgactatctgacaaatgtgaagtttctccaatttgccgagccggagccggacgaggaatccccctttaccgtctgcggccaaaccatcctattgagcaacgccgcccttgccgacgcaatctctgctttgccggagcagacacgggaagaaatcctgcgctattactttctgcgccagccgcagcgcgtgatcggcgcgtgtattggccggtcatgcagcacagcggggcggcatatccagactgccttgtagaaactgcgggagaaaatggagaggtgccgccatgagtaaacttctcccctatgaaaccattgtcaaagcctgtgagggcgacccggaagccgtgaacgccgttctgctccactacgccggatatatccgctatttctccaaggtgaacggacaggtcaatgccgaggttgaggactatgtgaaacaacggttaattgactgtcaattcaagttccggcttgacgaaccgccggacaagccataaaaactgaataccagccgccaccagcgcggccagcgaaagcagtaagtcttgaaaaagatttactgcttttttgttgtctggctccgcttccagccattttgacccctgccggttgtagtagtaagtgaggggggaatttttctgccctggtgtttggcatttggagcatttacccgtagtagagagcaaagagaaaggctttctccagcaccgggtagaaaccactgcgcccggtgtcattttagcgaaggcgggcaggaataccctttgcaggattagtagtagcagaaaaggagaaatagattgcaaaagcggctcccgatgaacgagtagtaggcaaagggaaatttgaaaaaagcatttatataagccgggaaaaagtggcgaacggaagtgaggggaagtttgcagtcacggagagcaagtttctaccacggtgccaaaatccgcaattctgcggttttgcccctcgcgggaaacttgttggggagtgccttccccaaaccctgcttatcgtcctcgcggactgcatatcatttacttccgcgccagcgcgaaagttcattcattccgtcgctcgtcctctccccacgcaacccgcttcgctgggcttgcgcggggaccccatgagcgccgcccacgaaaggaggtcacactatgcgaaagaaatacaacacaccccaccgcagccgcgttgtgaaaacccggctgtccgaagaagaatacgccgacttcacagcgcggcttgcgccttatggtatcagccagtccgaatttctccggcaggcaatacggcgggcgaccatacgccccgttgtccatgtgtcggcggtcaatacgaacttctttccgctgtcgggaagctgacagccgagtacggcaggatcggtggcagcctcaatcagattgcccggtatctgaacgagtacggcgtaccctaccatgcgctgtccggcgagatacgcgccaccatagccgaccttgccgcccacaagtatgaagtcctcaagaaagtaggtgacgtggttggcaacactcaagcatttaggctctaagaacgccgattacggagccgccgaagcctatctgacctttgagcatgacgagtttaccatgaagcccacccttgacgaacaggggcggctgatcccccgcaaggattaccgggtgtccacgctgaactgcggcgacgaagattttgccgttgcctatatgcgctccaatctccgctacaggaagaaccagcggcgggaagatgtgaaaagccatcactacatcatcagctttgacccacgggacgcggcacacaacggcttgaccgcagaccgggcgcaggcgttgggcgagaagttttgcgccgagcatttccccggacaccaagccctgatatgtaccacctggacggacataaccacagcggcaacattcatgtgtatatcgtcatcaacagccttcgggttgaggaagtcccgttcctaccctacatggacaggccagccgacacgaaagccgggtgcaagcaccgctgtaccgatgctgccttgcgctacttcaaatccgaagtcatggagatgtgccactgggaggggatttaccaaattgacctcttgaacggcagcaagaaccgcgtcacagaaagagagtattgggcgcagaaaaagggacaggccgtgctggacaaacagaacgcccccatgtttgcggagggtatcacaccccggcagaccaagtttgaaacgaacaaggaaaagctgcggcggaccatacgcaaagcccttttcaccgctgccagctttgacgagttttcctctctgctgctgcgggagtgcgtgaccgtcaaggagagccgggggcggctttcctacctcacgccggacaggacaaagcccattaccgcccggaagctgggcgacgattttgaccgcgccaccgttcttacgcttttgaaacagaacgccgccagagcagccgaaacgcccaccatcccgcgcaccataaaagaccgtttgcaggccgccagagccgagatagccgcccccaaacaggacggtgtgcagcggcttgtggacatagccgccaagagagccgagggcaagggaaaaggctacgagcattgggcaaagatacacaatctgaaacaggcggcaaagacactgaatgtgtatcaagaatacggatttacttccccggagcagctggaagcggccatagacaccgcctatgcggaaatgtggcagattagcggcgaactgaaaacgctggaaaccaagctgcaagggaaaaaggagctgcagcggcaggtgttggtctacgcccagaccaagcccgccggcgacggggtgaaagcgcagaaatcccccaaagcccgcgacgcataccggcaggcgcatgagagcgattttatcatagccgaagccgccgcccggtatttccgggagcatggcattaccaaactgcccgcccggaaagcgttgcaggccgagatcgagcagcttatttccccaaaagacagcctttacaacggctaccgggaacagaaacggcggttcaaggagttgcagacggtcaaacggaacatcgaccaaatcctgcgccgggaggaaccgaaccgcagaaaggagcagaaccatgagcgataacccgccccgcatggactaccgccagcaccggcgggcgcggcggctggtacatgagtgctgtaactacgacgatgggaactgcctgctattggacgacggggagccttgcgtgtgtgttcagagcatttcctattcctgctaaaatggggtccccacaaagtcattgactttgtggggagaggaggagcagcggaatgagtgagctttcccgccagcagggaagcgagggatatggagcttgcgacgacgaggttccgtgtggctgtcctgccccttgacggggagctgtccgcagcattcttgtaccggggaagccggaaacggtgcgcggtctgcggggcggctttgcccccaaatccaaccggggaaagtactgtcccgactgcgccgccaaagtacgccgccgcaaggaagccgagcgacagcgcaaacgctaccaactttctacgcatttaagggttttcaaacccttgtaaatcaaggctttttacctaccctcaatagtggcttgatacatttctttttccctcagaaacggtgttctatatgcgtacaaacgccctaaatccacccaaaggaggaaccatgtcagataaccgaaaatattactacctgaagctgaaagagaattactttgacgaggacgctatcgtgctgctggagagtatgcaggacggcgtactctactccaacattctcttgaagctgtacttaaagtcgctgaaaaatggcgggaagctgcagcttgatgaaaatatcccttacaccgcgcagatgattgccaccattacccgccagcaagtcggcaccgtagaacgggccttgcagatctttatgaaactgggggttgtggagccgctgcaaaacggcgcactgtatatgagcaacattgaactgatgatcggccagtcctctaccgagggggagcggaaacggcgggcaagtctgactttgcaggagcaaaaggccttgccaaaggccggggcggacaaatgtccaccatatcaagcggacatttgtccaccagagttagagatagaaaaagagagagcacgagagttagatacgggacaacccgcccgcgccgcctatggccggtatggaaatgtctttttgacccaatcggaactggacgggccgaaagctgatctgcccggcaaatgggactactacattgaccggctatcctgtcatatcgcgtccagcggcaggaagtatcacagccatgccgccacgatttacaaatgggcgcaggaggacgccaccaagaaaccctcgaaaagggcatacccgactactcatgcaaggagggcgagagtttatgaagaacgaaatcaacgctgttttggaaaatatgaaggccaccacaccggagcggtcggactacaccagcgaggacggtttgctgcactgcggcaagtgccacaaaccaaaagaagcctacttcccggagggcaaggcattgtttgggcttgaccgccacccggcagagtgcgactgccagagagccgcccgtgaggagcgggaagccgccgaacagcggcgcaggcaccttgacaccgtggaggaactgaaacgctggggctttaccgaccccaccatacgggactggacttttgaaaacgacaacggcaggaacccgcagaccgaacttgcccgccggtatgtggagcatcgggaggatatgcgaaccgacaatatcggctgcctgttctggggcggtgtgggaaccggcaaaagctaccttgcgggctgtatcgcaaacgccctcatggagaaagaaatccctgtccacatgacgaactttgcccttatcctcaatgaccttgccgctagttttgaggggcacaacgagtacatttcccgtctttgccgctatccgctgctgatccttgacgacttcggcatggagcgcggcaccgagtacgggctggaacaggttttcaatgtgatagacagccgttaccgcagcggtaagccgctgatcgtcacgaccaacctcacgctggacgacctgcggaatccggaggacaccgcccattcccggatttatgaccggttactttctatgtgtgttccggtacgctttaccagcgataacttccggcaggaagccgcacaagctaagctggaacggctgaaaaagctaatgtgataaggaggcggtacgatgaaagaagttcccatctgggaaaagagcaatttgagtttggaggaagctgccgcctactccagcatagggattaacaagctgcgcgatctcacgaatgaaaaggactgtcggtttgtactatgggtagggaataagtgcctgatcaagcgccgcctgtttgaccaattcatcgagcagatgtattccatctgaaatttgtggtgtgaaagactgcctgaatatggtacaatcaaagtgtcataccaaggctctttccattacggaaaggagtttgacaatgtccgaaaagcgcaaagaccataagggaagaatcctgcggacaggagagagccggagaaaagacctgatttatcaataccgctatacggatatccggggaaagcgccagacggtttattcctctgatttaagggaactgcgggaaaaagagaaagaaatccagaagcagcttgacgcgggaatcgactatgccgccggaaaaatcaccgtcatagaactggtagagcggtatagcggcctaaagcagggcgtccgctacaacacgaaggttggatacaattttgtgcggaatctgattcggcaagaagattttggataccgcccgatccgggatatcaaagtatccgatgcccaacagtggatcatgaagctgcacggcgacggaaagggagacagcaccatcaccagcgtgcggggcgttgtcaaactggcatttcaaatggcctgcaacgaggatatcatccgaaaaaatcccatcgacttcaagttggtggaggtcgttcccaatgactcgcagaagcgaatcaccatgacccaggagcagcaggaaatctggatgggttttattcggggtgacaagacctaccgcaagtattacgatgagtttgtagtcctgctggaaaccgggatgcgggtgagcgagttctgcggcctgaccaaaagcgatctggattttgagaaccgtcgtatccgggtggatcaccagctcgtccgggagcggggcagcaagtactatgtggagaaaacaaaaaccgaatgtggctgtcgttttattcccatgacggatacggcgtaccagagccttaaaaatatcctggctcgtcgcaagacactcaaagcagagatgatcgtcgacggatacaccggatttttgctgctggataaggacgacaagcccaaggtggcactgcacatcgaaaatgagatgcgctgggccatgaagaagtatcgcaagctgtacccggacaagcccctgccgcacattactccccatgtgttccgtcataccttttgcagcaacatggccaatgcgggtatggatatcaagaacttgcagtatgtgatgggccactccgatgtgggggtgacactgaatgtctacacccacgccagctttgaccgggcagccgaacagatggcaaaaatccttgcgttccccactgtgacagcttgaaaaatcaggtcaaatccgcagttggtactacaccaattactacaccatttgccaatgaaattgtgtagatttacgcagatttgcgtgggcagcatggcaaccacaacgaaaagaaaaagcgccgaaaagccagtcatatcaatggtttgcaggcttatgaagggatatataagagatgaccaaaatactatttgtttgccacggcaatatatgcaggtcgcccatggcggagttcatgctgaaggacctggtcaaaaaacgcgggatggagagggactttctgatctcctcctctgccaccagcgcggaggagatcggcaaccccgtccatccaggcacggcgagccggctggcccgggagggcatctccacagcggggaaatatgccgtgcagctgaagcggaccgactatgaccgttacgactattttctgggcatggatcaatggaacgtccgcaatatgaagcggatcttggggggagatccggagaacaaggtgcacctgctgctggactttaccgggcggccgggggaggagatcgcagacccctggtacacgggagactttgaacgcacctatgcagatatcctggaggggtgcaccggcttcctccgacagctggaggggcaggggacatagactgcagcggaggacggccgtcccccgcgccatattagaagaaaagagaaagatggcggccccggatttccgaggccgtcatctttctcaggtattacgccttttcaaactcactcttgcccagaccacacacggggcagacccagtcggaggggacatcctcccagggcgtgccgggagccacgccgttgtcggggcctcccacggcagggtcatattcatagccgcaggggcagacatattgatccatcatgaccgctcctttctcagggacagaggatcagccaaagtagcgcttcagcaggccctcgaacgccttgctgcggcgggcctcgtcccgggccgtctatcctcgccggatcagcaggccgttttgcgtcctatggaaatgcagtaattgcaagacttttgcctccgtctccattctaaataacaaacagccaacgcccaaagcaggcgttttcgggaaagtgctgcctttctatccacttttgggagacatatcatggataaactggatgatgcaggtgtttagttactagcaaataagcattggatgttccaatacaccatcgcggtggatggcccaaagaaggatgtccgcaagagaaataacaagttcggcaatcctacgaagacagagacggaggcaattagagccagaaacaaatgctgctcatattccagatgggggccaaagacaatatcgaaacggcaaagtcggcatacaaggtattctcgtctaatggaaagcacttttcggtcaagtatgctccctatgctctgcattttatggaatatttgggctcggcgttggcttggaggtattctttcaaaagaagaagtcggttgcaaatgtagtaatttccgtagttgggtatagattttacctccttgtgcggggttcttataattataacatgccgacagaaaaaaggggtggtaaacacccctttgatcagttttacactttttcgagatcaatgatctttctgatatcgctaatctccaatgcggtggcaatcttacctaagtgttcaaaattgataacagttcgagtgcctctcacgatatcgcttattgttgattcccgtactcccgccatctcggcgagttttttctgtgttataccttcctcttcaagaagttctttaacacgaagtttgacacggtagctcataccagactaattccctccatgctcgaaagtaccatgtaggcataattccaaaggctggggtcttttccaaaaacagtaggcttgtcgcccaaagagccagccaaatccataacacttcttgtgagtccgactttgtgcttgttccaaacagcgatgggatctttgccgtccatccacttatacttgcctgaggtgatatcatactcgagaagaactctgaatgccgccagaatgggatagagaagaccatcgggaattttgtagtaaatatcactcatgcagaatttactcttgccgacggggctgccctctttgtagccagaataggactttcgaccgtacatacgaccattctcgttataagctacagcaaactcagtttcgatggcatcgtaaagatcaaacagatcgggaatgacattcacaaattttctgtagtgctcggggtcgtccaaatactcattcagcatggcctgtttgccagagtatgctttggtaggatgctccgcactgttatacttatcgatgttgaacatacaaatgatagaaacgatatcgcgcgcgtcgatcattttcagagcctttttggtatcggtgtcttttgtgatctgattctgcttaaaggaaattctattaaagaagggaagtccctcgaggccttccttgatgggatcgaacttctctctcagttctgccatagactttgcatcgactgcgatagaagtattacgagcttcagccagatcggcaatcattgcttcgacaccagtcattacttcaaactgaacatactgttccaggactttatccttgttctcaagaaggatcttgtaggtatgtccgccatcaatgttgccatggcagctttcatcctcgaaatcaatggttacttcctgcaagcggttatcataacgcactctctttgcggagagaatgatgcctctgttcttcaggtggaactggccgtcattactcagcagagactctgtgattgcatttgccacagtagagttgagtttctgatcgcgggggtttgtggacatgggaataccctcagggacatcgcaggtcttggcatagaaaatgtactttctcggagtttcgttgccaagaggatcatcaaacttcctaaaattgttgtcgctcaccttaattgtctttctaatcataattacctctttctgaagaccaggcttcgaattatgtgtacgaatgcatttgcatatcgcaatatcagaataacgaaatatcgatattttgtcaagggggtaaaattaaaaagtttggaaggaaggcggtaaaaggctttgtagaggtcgccatagaccttcttgaagccagtaatatcgaagtgattggagaggacagaagcccagtggatgatgtaagtccctgcggtcagtccctcaacctcacgcaccaaaatttcagcctagatagtgtcgcggatgtcgttggtcttggcttgagcttcttccattggggcttccatcttggaaaccactttgttcttgcaagttgttcaaaagaagtgaaaacttctcataagttatcagttttgctttatttttcaatattaggcgaaaaaccgcttaatataggtgcaattcaagaaagttgcacatgtgaaagtcaaaaaagtgtgatacggagaaaagttacacccaacttgcacacctgcgcggcggaagagcaaaaagagagggaaccggtttcccgattccctctcaaaaagtgcttgtttatccggttatcgattagccgaagtaacgcttcagcaggccctcgaaagccttgccatggcgggcctcgtcccgggccatctcgtgcacggtgtcatggatggcgtccaggccgttcttcttggcgcaagcggccagctcgaacttgccgttggtggcgccgtactcacagtccacacgccaagccaggttggccttagtgtcagccttcatgttggcctccaggtcctcgcccagcagctcagcaaacttggcggcgtgctcggcctcctcataggcggccttctcccagtacaggccgacctcgggatagccctcccggtgggccacgcgagccatgcacaggtacatgcccacctcggagcactcgccgttgaagttggccatgagctggtcaaagatgtacttcttgtcctcagcgctgatatcggggttgttcttcacagtcttggcatagatgccgaactcatgctcggcagccagcttcatctcgcccacctgctccacgaacttgtccttaggagccttgcagatggggcagaagtcgggcgcggtctcgccctcgtacacataaccgcaaacggaacagacaaactttttcatgacaatttttcctcctgttttattttattttggcaattttcacacgtgccgtagaagatgagctcatggcgctggaccaggaacccatattgcgcgctgacggtctgatccagatcgccgtcatccagcatgggatggggcagatccatcacagcgccgcagcaagtgcaaataaggtgactgtggggggcaatgcacccgtcgaaccgctcctgtcccttgacgacgccgatgctctggatcaggccctgctgttggaacaggactaggttgcgatagaccgtccccaggctcaggtcggggtgggtgggtttcagagtttgatagacccactcggcggaggggtggcagtcggtgctctggatcgcgttcaaaatggcctcccgttttctgctgtatcttgtggcgcgttccatagggccctccaaatagtaataattcttattacgggagaatcataccacagaaacagctgcttgtaaaggggaaaatcaaaaaatccgaaaatttttctgttcagggccgggagctatcttcctttgtatgacggaattttttcaggatggactcctcccagcggtcgccgtatttcatccccagcaggaagacggccacaccgatgatccccagcaggaccatagcccaaagagggagagtcagggtggcaccgcccaaggcgctggctaccagcaggccccagggacgagtgagcacaacgatcaccagaaaacggggggtggagatagcggtgagcccggccagaatgcacagcaggtcatcgggaaagaagggcaggagaaaggccaggatgaggaaagtgtctgttttggcccggacgatggagaggtacttgtcggaaatggcccggctcaccaggcggtccgcaaaagattggcccagcgcgcgtgccaggagaaagaccagcagggaggcggagaggaccgcggcgatggtaagaaaaaaggagggccaggtgccgaagagcatcccgccggcggcggcgctgaggttgctggggatgggggccagcaccacagacaggaactggagcaggaaaaaacagaggtgggagtagggagcgaactgagagatatagtcctgaagggcctgctgggaggagagggcggcgaagaagccgctgcgccacagaaagacgccgcccagggcgcacaggagcaggaccaggaccgcgctggtgattttcaggagatgtttcatgagggacctcgatcttctctttagattcgcgggacagtggaggccggcggcgcgccagcctgcataatccctatggtatcacagaattgtggcggatgtgataagtttttcttaaattctcataaaaatgtcgaagcggggcgaaaaaagagggccagcaggctgctggccctcccgggaggagcggggagcggatcacagatgaaagcgcctgcgcacttcctcgcgcagggccgggacccggcgcaccacgatgagggggatgaccagggcagcgcatactgtgagcaccaccagggaccagcccggctgccagcggcccaggaagtagcggtcgatgagcagctccacgccggagagaaaaacgccggtggtgccgatgaccagggtgatgcgggaaagggtgctccggggcctggcccccatcataaagcccagaaacagcagcgccgcccccagaagcaggatgatgggcagggccagatgccaataccaggctgagccgtccagatccacggagatcagaaagacgtagagggcgacggccagcacatctgccgacaggcggagatagaggtgcatggtgcgcaggagcagcggtgggaccagccagacccacagcatggccgccgcgccgatgacatagagggaccagatatggccgctgcgcagcaccagattgagcaggccgcagcacaccgccactgaggccagcatggaggacaccaggatggccaactccgccttagaggcggggggcacctcccgccgttcggtggggaaggggggagaagagccggtgtccaccggctgccgggggttgaccaccggggtgcggcagagggggcagaaggaggcggtggaatccagctccacgccgcagttgacacaataggacatacagaacacctcccagggacctcagcgggtccggttggactccaccttgacggggatgccttcccgtaccaggtgggtgaaaaagcgccgctccgtctcgctggaggtgccggtgccggcgaaggtgacagccatggtattgccatagctgatggaggcgcagtgaggggagggccgggtggcctgccccaggacgacctccatccgctggatgtgaggggccatctccggcgggacccggaagaggccgggattggtgtaggtggcggagaaggggcgcacccccaccagctggtaggagagggacatcaccgggttcttcaggaagatggggatcagctggagaaagcggttggctgtgaagtggacattgccggtgaagcgggcccgcatctcctggggattgatgtgcaggcgcatgtagtggtggacgtatcggaccagctcagggaaggtgtaaggccccagagtggggtccacgcagagccggacagtgaggatgaagttgcggagggtggcggaggggaaccagccccggagatcgatgggaatggccagagccgcgggcctgggacggcgggggcgctggacctcctgattctccaggatagactggaggagcactgcggagaggtattcggtgatggaggcgccgtaccgggcggcgatctccttcagccggtccacgggcagaaagcccatggtgacattcagggtgtagaagggctccgcctggctggtgttggagaaagcggtctcctgccagcggtcccgcaggacccgcttgcccgcgtaccgggcgtaggcatcctccagctcctccggacgaggggaatcatccacgtccagcaggccggggccgcaggggatggggtgtcccagctcccggaggtagaccgccagcagggtgcggaaaaaggtgagggcccccgccccgtcagacacagcgtggaagacctccagggagatccggctctggtagtagaagaagcggaccagccatccgttgtcctcccggaagcggatgggctggcaggggttggacatgtccggacggacaaaggggccggggctgtcgttgggctcgaaatagtgccagaagaccccgggcttcatccggacgcggaaaccggggaaccggggcatggttcggtccactgcccgctggaggacggcggggtccaccggctgggacaggacagcagaaaagcggtagaccggcgagtacttctcccgctggagagcggagtagaggacgccggcgttgtccagccggtaccagtcagggggacctttgggcgtcttggacatggcggtgcctcctttcctttgtgatatcagtgtagcatctcctgggggaaagtacaaggggaggggaaaaagtataaaattcaacgctcccattcgctgcggcatgggcgtgccttttctgaccttgcgcagggagagctgcttgaagaatatgccgtgggcgggaggcggatcggtccttcccctggcctcgtgggcctcccgccacttcggagagcctgggctcttcgggggcaggggagaggaatacggcagttagatgaggtccatcataccgtatctccacgcccgccgcaaggcgtgcgcacctgcccgcgcgattttgtcagaacgccgcagcttttcccggcaccgcaaacaaggcggcggggagaggccattgccaaacgcggccggatgtggtaggcttgtcatgatccaggtcccagaacaggaaggtgagaacgatgacactgaaagagagaggaagacgggtgcgggtgacccatcccacccccgcccagcgggcggaggcggaggagcgccgcctggcccccatgatgagggccctgaaggcaatccactcggccagctcgcccgagtccatgcgcccggaggacctgaaacggcagcgggcggctcaggaggtgctgggcaggctcatcacccccatgatcgggatgaagtgggccccctttgagctggaggggatgaacgcggcctgggtgcggcctgagcggagctatgaccggaaccacgccatcctgtactgccacggcgggggctataccagcggaaatctgggctactcccggccgctggcctccaagctgtccggcgtgacgggctgggacaccctctcctttgagtaccggctggccccggagcaccccttccctgcggcggtggacgatgcgatgaaggcgtgggaccatctgatgcgccaaggctacggggcccgggacgtgacggtggcgggggactcggcgggaggaaacctggcgctggtgctgtgccaccggctgaagcaggagggcaggcggctgcctgcccggctgatcctcatgtccccatggacggacatgacggccagtgggaagtcctatacagagcgggcggagctggaccccaccatcaccctggactatatccgggcggtgcgtggggcctatgcccgggaccaggagctgacctcccccatgctgtccccgctgttcggggatttccggggcttcccgcccacactgatccaggcggggagcaacgagctgctgctgtccgattccgtgcgcctgcgggaccggatgcaggcggcgggggtcccatgccggctggaggtctggagcgacatgtggcacgtgtttcagatgttccccatcaaaaaggcgggccaggccatggccagcgtggggcgcttcctgctggaatacacatgaaaatggtccctgtccgcaggagagcgggagggcacagcgggatcaaggagaaaagatcgagggccgccccggtaggggcggccctctcgtttctggggtaaaacttctgcaaggagcacgtctgggagctcagggcagcgaggatgctccgtcacagcagcaccacgccggcctgctcacaggcccggacggtgtcggggtcccacagggaactctgcacctcaccgatgtgggccttgcccagcagcagcatggacacccgggactggccgatgccgccccccatggtcaagggcagctcaccgttgagcagcatccggtggaaggggagggagcggcggctgtcacagcctgccagggtgagctggcggtccagggactctgggctgacccggatgcccatggaggagagttcaatagcctggccattgacgctgtcccagaacagaatgtcgccgttcaggttccagtcatcatagtccggggcccggccgtcatgtggctgacccgacttcagctttccgccgatccccatgagaaacaccgcaccgtgctcccggacaatggtgttctcccgctccttgggggagagctggggatatagatcctccaggtcctgggcggtgacgaaggtgacctggccaggcagctcgggcagggcggacagctgggggaaaacggagcgcaggaaggactgggtatccacgagagcgcggacaatggcgtttaccgtctgcttcagatagtcccgggtgcggtcctcctgggtgatgatcttctcccaatcccactggtccacgtaagcggagtggaggttgtccagctcctcatcccggcggatggcgttcatgtcggtgtagagcccctctccggggtggaactgatagcgcttcagagccaggcgcttccacttggccagggagtggaccacctgggcggtgtcctccacccggttgatctcaaaggagacggggcgctccaccccgttcaggtcatcgttgaggccggaggaggcggagacgaacaggggggcagatacccggtgcaggcgcagggcaccggcgaggcggtcctcgaacagacgcttgagcaggctgatggccttctgggtctcatagaggctgaggagggagcggtatccctcgggaatgacggtttttcccatgtcgaatactccttttgaaagggatttggaacagaagctcatccggcagagccgggatggaacgcctggtgagcacatacagatttttctattatagcggagaagggcggaaaaatcaatctgttcttgccaagcggggcacgtctttgtataatagggtccatccaaagttccgacggagggagagaggagatgcctatgaaattcatttcctggaatgtgaacggcctgcgggcctgcctgaaaaaggggtttctggacttttaccgacaggaggcacccgacttctgctgccttcaggagaccaagatggagcagggacaggcggatgtggagctgaacgaaggggtcttggagttctggaactctgcggagaagaagggatactccggcaccgccgttttcaccccccaccagcctgtggctgtggcctacggtatggacaaggaccggcacgaccacgaggggcggctcatcaccctggagtatgagggcttctatctggtctgctgctacacccccaactcccaggacggcctgaagcggctggactaccgcatggagtgggaggacgacctgcgggactacctcatgtccctggaccggcacaagccggtggtctactgtggggacctgaacgtggcccaccgggagatcgacctgaaaaacccaaagaccaaccggaacaacgccggcttcaccgaccaggagcgggaaaagatgacctgcctgctctcctccggctttacagacagcttccgctatctctacccggacacggaggggatctactcctggtggtcctaccgcttcaacgcccggaagaacaacgcggggtggcgcatcgactatttcatcgtctctgaccgcctccgggacaagatcaagcgggcggagatcctgaccacggtggagggcagcgaccactgcccggtactgctggagctggacatctgagtgccccggggcgggaccggaaggagataaggaggatctggatatgcgcagagcagagaaggaagtcaaagacctggagcagttggaggagatcctgcgggactgcaacacagtgcggatcgggacccaggatgcggaggggatgttcatcgtccctgtgaattacggctacgacctgacagaggggcagctgaccctctacctccactcggcccgggaggggcggaaggcggcggcgttccgccggggcggggcggtggcctttgagatggactgcggccaccagctgatgagggcggagcaggcgtgcagttacagctgtgcctaccgcagcatcatgggcagcgggaccatccgggagctgaccgagccgcaggagaaatatgaggccctcaacgccattatgcgccatatgaccgggcgaaactgggagatgacggagcccgccgtggcccgggtatccgtctttgccatccgggcggagcgctggacgggcaagcgcagcccagccaactgagaggaggtagccgaaatggtcttatttgatccccacagatacgcctatccctcccgccgcagcgtggtgtacgcccgccgggccatggcctgtacctccgtccccctgggggcccaggtcggcctggatgtgatgaaggccgggggaaatgccgtggatgcggcggtggccatggccgccgccatgcccctgctggagcccacaggaaacggcatcgggggggactgcttcgccctggtttgggtggagcgggagaaaaagctgtacggcctgaacgccagcggcgtgtccccagcagctctgtccgccgccctggtgcgggagcggggcttcggggagatgcctaaagagggctggctgcccaccatggtgcccggcgcccccgggggatgggcagagctcaaccggcgcttcgggacccgcccccttgaagagctgttcgcccccgcggcctcctacgcccgggagggggtggctgtgccggtgaacgtggcggtccagtgggcactggacggcccccgtatcggccgggctatggaacgggacccggccccccaccgcccctggtgggagcggatgatgaaggcggacggcaccccataccgggcgggagagatcttccgctggccggagtacgctgacactctggaggagctggcagccaccagctgtgagagcttctacagggggagcctgatggagcggatggtctccttcagccgggagacggggggctttttccaggagcgggatctccaggactaccgtccggagtgggtggagcccatcaccgcggactacaagggctacaccgtgtgcgagatcccgcccaacggccatgggatcactgtgctgatggcgctgaatatcctgaagggcctgcccctctcccaggagcgggacagcgccgacacctaccataagattttggaggccatcaagctggctttcgcggacaccaggacctatgtggcggacccccggtacatgcggacccgggtggccgacctgctctcggaggactatgctgcccggcggcgggccctgatcggagaacgggccctgctgccacaggcgggggacccctcctgcggcggcaccatctacctgtgcaccgcggacccccagggcaacatggtctccttcatccagagcaactacaccaccttcggtgcgggcatccgcatcccgggcaccggtatctgcctccaaaaccggggggccaacttctccctggatgagggcagcgataactgcctggccggcggcaagaagtcttaccacaccatcatccccggcttcctgatgaaggaagggacggcggtgggtcctttcggcgtgatgggggccttcatgcagccccagggccacgtgcaggtggtggtgaacacggtggattaccgcatgaacccccaggagtgcctggacgctccccggatgcagtggaccggtgggaagcgcatccagctggagcgggaggtgcccgcccacatcggcctgcgcctggcggagatgggccaccaggtggagatctgcaactccaacctggacatgggacgggggcagatcatctggcggatggaggacggcaccctggccggcggcaccgagccccggtgcgacggcacggtagcggcctggtgaagagagaggagagatcttgtgaaagagcgcggcctgatccggatcattattctcctctccggcgccctgctgtgggtggcctacctgtttgatgcggtctgttcccgatacgctatctatgaggtgatcggctatggggcccatgagctgttgtctaagctcccctatgtgtctgccctgaccaccgcggtctggctggccattacgctggtgaaaggggcccggggaaagacactgcgccgggagctggcgttctgtggggccctggcggtcctgctggcggtgcagtggggctatctgatcgagcaatcccaccgctccaccgccaccgttctggcccaggtcacagagacggtccttgtgccggcgcaggggctgcaggcggtgatccggcatccggaggggtatgagatcacactgtggtgcccccagctggcatgggagctccttcagccgggaacggagtacctggtcacctacgagtgggatgaccgaatgccccaggaggggaccttgtgtatggtccatccctgaaaatctcaattttgatcaaggaggcagcagccatgaaaatagcagaattgttcggaaaggggaagaccgtcttttcctgtgaggtgtttccacccaagaaggacagccccgtggacactatctatcagaccctggacgggctgaaggatattaaacccgactttatcagcgttaccttcggagccggtggctcccaggtgaaccagtccacccgggagatcgcggccatcatccagaagcagtaccacatccccgccatggcccacctgacctgcatcaccgccaccaggggggaggtgaccgagctgctctatgacctgaaggcagacggcgtagagaacgtgctggccctgcggggggaccggaacccggactatcccccaaagacggagttcctccacgccgacgagctggtggccttcatccgccggcggggggacttcggtgtgtccgccgcctgttaccctgaggggcacccggagagccccgacgcggtaagcgacctgcgctacctcaagcagaaggtggacgccggcgcccagcatctggtgagtcagctcttctttgataacgaggacttcctccgcttcctggagcgggcccgcatcgcgggcatcacggtgcccatcgaggcgggcatcatgcccgtgctgaaccagaagtccatcgagcggatggtatccctgtgcggggcctccatcccccggaagctctcccgcatcctggctcggtacggcgaccacccggaggccctgcgggaggcgggcatcgcctatgccatcgaccagatctccgacctggtggccgccggggtggacggcatccacctttacaccatgaacaaccctgcggtggccaggcagatcagcgacagcgtctccgccatccggcgggtgtgagcgccatgccaatcgccctgggggagctggacctggacgaggtgctccgctacatggggaccccgcccagccaggccgggccggaactgcgggccctggcggaggagtgcgggcgggccgtatgcgccgccgcccggccccgctgggcctggagggcctttgacatcgcagaggaggcggacggggtgcgcctgtcctgcggcctgctgctgccggggcaggacctgaagcgccacctgagggggtgcggccgggcggcggtgttctgcgccaccctgtccgcccaggtggacgccctgatccgccgctgggagagcggggacatgctgcgggccctgaccctggactgctccgccgccgccgcggtggagcagatgtgcgaccagatcgaactggagctccaggggcacttccccggctgctccttccctttccggtacagcccggggtatggggacctgcccctggagctccagaaccccctgctggacctgctggacgccccacggcgggtggggctgtgcgccagcgccagccacatcctcaccccccgcaagtcggtgaccgctatcttgggggcggccgacggacccatccaaccaactgtgcgcagctgtctgggctgtcccgcccgggagagctgccagtatcgaaagtcaggtggacactgtggaatttcgtgaattgctgaatacgccgggccccgtcctgctggacggcggcatgggcaccatgctgcaggccaggggcctgtccatgggggagtggcccgagctggccgccctggaacacccggactggctggaggacatccaccgggcctatgtggaggcgggggcccagatcctgtgcgccaacaccttcggcgccaaccgggagaagctcggccgcaccggccgcaccgtggaggaggtggtccctccctcagtggagatcgcccgccgggcggccagggggagggccttagtggccctggacgtggggcccaccggccagctgctggagcccactggcaccctccgctttgaggaggcggtggatatctttgcccagacggtgcgcgccggtgtccaggccggggcggacctgatcctgatcgagaccatgaccgacctccaggaggcccgggccgccctgctggccgctaaggagaacagcagtctgcccgtcatcgtcaccatgacctatgaggagcggggccgcaccttcctgggctgcgacccggcctctgcggccctgaccctggaggggatgggggcagatgccatcggagtgaactgctccctgggcccccgggagatgcccccgctggtgcgggagctgacccggtggtccaccctgcctatcgccatcaagcccaatgcgggcctgcccgacccagggggtgcggggtatgacattacggcggaggagtttgccgggagcatggcagagctgaccgggctgggcgttaagctatacggcggctgctgcggcactacgccggagtatatcgcactgctgcgggagaaactggcgggccgcaccatcgtccaggtgccccggcaggtgcccgcggcggtgtgcagcggcacccgcaccgtgcccatcgaccgggtgcgggtcatcggggagcggatcaatcccaccggcaaaaagctgatgaaagaggccctgcgccggggggatgtggactacatgctgaaccaggccctggcccagaccgaggcgggggccgacatcctggatgtgaacgtgggtctgcccgagatcgacgaggcggagatgatggtgcgcacggtgaaggccctccagggggtcaccgacgcccccctccagttggactccaccgacccccgggtgctggagggagccctgcgggtctactgcggcaaggccattgtcaactcggtgaacggggacgaggagaccctgaacgccatcctccccctggtgaagaagtacggcgctgcggtggtgggcttgacccttgaccacaccggcatcccaaagacggtagacgcccggctctcggtggcccgccgtatcctggaccgggccctgtcctatggcatccggcgggaggatgtgtacatcgactgcctgaccctcaccgtctccgctgagcaggaggccgccgcccagaccctggagggcctgcggcgggtgaagggagagctgggcctgaagacggtgctgggggtgtccaacatctccttcggactgcccgcccggcccctgatcaaccagaatttccttaccatggccatggccgccggcctggacctgcccatcctcaaccccaatgtggacgccatgatggcggcagtgcggtgctaccacctgctgatgaacatcgacaccgacgcccgggaattcatcgccgcttacgggaacgccaccgtctccacctctatcaccagcgcggccgggatgaccgccgcccccgcagcgggggaaaagcggggcctggaggagatcgtggaggccggcctgaagggggaggcgggggaggccacccgggccctgctggagagtcgggcccccctggacgtggtggacaacgtcctcatccccgccctggaccgagtaggggcggccttcgaggcgggaaaggtgttcctgccccagctgatccagtctgcaggggcggcccaggccgccttcgaggtcatccgggagcgcctgtccggccagccgggccagggggaggaccgggggaccatcgtgctggccaccgtgaaaggggacatccacgacatcggcaagaacatcgtcaaggtgctgctggaaaactacggctacaccgtggtggacctggggaaggacgtggacccagccgccgtggcggaggcggtgcggaagcaccgggcccctctggtggggctgtccgccctgatgaccaccaccctgaagagcatggcggacaccatcgccctgctccatctggagggcctgccctgtaagatcatggtggggggggcggtgctcaccccggagtatgcgtcccagatccaggcggacttctacgcccgggatgccaaggagagcgtggacatcgccaagcgggtcatcgggtaacgaccgcaatggggccgggaggggctgtcaagccgtcctcccggcctttctgtgccgcttaccggcggaaaaaggcctgacagctcccatccccttgcgtgtgagccagggatctgctatcctccggacagagaggaggcgaaggccatgaaaccacacattgtcacagaggacatgaggctccgggcccgggacgggcaggggctggagggaaagctgtatctgccccgggatggcgtcgtctcccggctggtggtccaggtcaacggctccggcccccagacctgcaacaccttccgggaccggggagacgggaccacgtacagcttctgcggcttctttggggaggagcttgccggtcggggactgggcttcttctgttacagcacccgcgggtgcaccgatggggatcagggtccactctactgccgagtggaccgggcggtctaccgctcctacacccctcagacctgtgtggccgacctggaggactggaccgccctccttcaggcccacccccgctgtgctggggcggagctcctgctgctggggtggagcgaggggaccatgatcgctccggctgtggctgcagggggagcggtacccctggccggactgctgctggcgggctacgccaacgggaccatggaggaggccctggactggcagcagcgggggctggggctgtacaccatgctctgccagtattttgacgccgacggagatgggagcatctcccgggaggagtttgagacggggccgggagcggtgcgggaggccctggaggcgaccttctccgggctggacctggacggggacggccggatcaccccggcggacctggaggcggtgtatgccgggagccgggcggagatcttccgggccatcgaggcgggggacgacgagtggctttgggaacactacccagtccccctcaccaccaactggttccggggccaccggaggtttccccccaaccgggagaccctgccccgtctggacctgcccatccatatcctccaggggaggtgggacgccaacacccctgcggaggacgccctggccatccaggagaccttccggaggctggggaaggacaacctcgccgtccacatctaccctgacgcaggacacgccctgggctttgagcagtatctggccaccggggaactgccccccgccctcaccgatctctttgagctgtgccaggggctgggacgatagaacaggagccggagagcgggcctctccggctcccgcttttttccggactccggggcccggaggagcacgcggctgaaagggaaagccccttgtgccctcctgtcccatctgctataatcggaacagaaaaaagtcgaatccgtgtgcggagccggaaaggagttcattatggcagagaccttgatcccattggaggagcgggaggaggagcggcgcccgtcccgggtggagccgccccgccggagcgggggctgggtggggaagctggccctggtgctggcggtcttcgccctggcggtggcctgtctggcgctgtatcggacactgccgccgggggaggatgacccacaggagccaggggagagagcagagtcccctaccatctcctaccgggaccgggagctccccgtcctggaaggggtggcggtgaacagctatgtgtcagacggcttctccgtcaatgatcggggctggctcacctatgagcaggatggaaagcaggcggccatcggcatcgatgtgtccgcttatcagggggagatcgactggcagcaggtagcggattcgggagtggaatttgccatgatccggctggggtaccggggatactcccagggggtcatcatgccggacaagaattttgagcagaacctccggggggcgctggacgctggcctggaggtgggggtctactttttctcccaggccgtcagcgtctgggaggcggaggaggaggcgcagtacgtcctggacgccattcaggggtacgatgtgacctaccccgtggcctttgactgggagttcattgccggggacacagcccggacggacggcatggagccggaggccatcacacgctgcgccggggccttctgtgatatgatccgggaggcgggctaccacccggtggtctactttaaccaggacctgggttatctgtcctaccagctggatcggctcaccgactataccttctggctggcggagtataacgcccgccccagcttcttctaccacttcgacctgtggcagtacacccacaccgcctcggtgcccgggatcgagggaaatgtggacatgaatctggccttccgggagtttgacgaaaagcctcagcatggggaagaatagagaaagagacggcgcccggtgcttgaagcaccgggcgccgctcgtattgattgggaggatcactccacatatttcagaccgctgccccgggtgacagtgcaggcactggccagtttttcggcccactggctgtactgctcgttgttcagggcgtttttggcgctgacggcccagacggggtcgtcccagcctgcaaagtacatgatatgataacccttgacggaactgccggtgttctggatgatgccggtgtctccgggctggcggctggggtccagggaccactgggtaaaggtgtccacatagccggagtaaggagagacatactggagcagcccgccgttggaagcagagctggtgtcagcgctgttctcctgggccagctgggcaaaggagtcctcagtggcatcgccggcctcccactgggccagcagttcctccgccttggcctttgcctgctcatactgctcttcggtgggggtgatgttggcgtcggcggcgccgatcaggatgtggcgcacatcggcggtgggggcgtcatcccgtacacggtcgtggaagagggctacgcagtagttatagctctcgctgctgccgccggcatactccaccaaggtgatgtcgccgggccggcgggcgctgtcataggcccactcgctgtattccgaattgacggtggagcccatctgttccagcgccacctcggaggagtaaatggagtcactgaactcctccgccagggcctccgggtcctccccggcctccaggcgggcctggagcgcctcggcctgctccttaacggcggccttctcctcctccagggcggcggccttctcctcatcggtcatttcaatggtgttgccctcgtcgtccacggtgttcacccgggcctggaaaacgaactgggacagagtgaaggtgtccagctcgtcggcgtgctcctcatagtaggcatccagctggctgtcgtcgtaggtgtaggagtccacctggctctgggcgtagtcagcggccagatagtagcgctccatgatctggacgaatttgtcatagctcatggtggggccgtagttggcgcggacataggcgtccttgctgccgtagccggaggtgatggtgccggcctgaatggagtccagggtgttctgcaggctctcctgggcctgggcggacatggtgtatccgctggcctgggcctcgttggcaatggccgcctgctgagtcagggtctggatggccacgtccagcagatggtcgcgccaggtctcgccggtggactcgtcgtagatctggtcctcgggatcgagggtgtagtccatggtgctggcgccgctgtagctgttgtagatctcctgctgaagggcgccgttgtagtagtactgcacatcggcggcggtgtagtcctgcccatcgatggtgacggcggcggcgcggctctggaagaaattgctgttccagatcagaaggccgacgccgaacaggaccaccagaacggcaagcaccgtgtagacgatgtggtggacatgggtctgacgctcctcctgctgctgcttgagcttcttttcactgagaccctgaccgctcgggtcctggcgggtcttcttctctcgggatgcactcacagtttgttcagtcctctcgttcagttggcaatgcgcgtggttcacgaccgcacatttcttaatattatataagaaatgaccccaactttcaagaggagaagcgggttttcctctgggcgggggcagcttttacattttattcatgtttccggggagggagcaggcgtaaaaaagagccgcggcaaagccgcggccccagttccaaatggatcatttataccccgctctggccgtgtgggcccgtttaaaacctgcacgactggcaggtgggtcacctccacagcgctttactgcttccaacttccagcatgccgcaggggcagccgggaggcctgcaagccacgctgtgagggggtgtcccgttttagaaatgtgggtttaaaagagcccatcacgcaccgagcaggagatccagttcggtcaatcctccatctcttcgtccgcaaagagacgttccataaactggttgtagatcaggtccagctcttcatcgctgtccagggtggacagcagctcctcgccgtcctcctccaccaccttcatgatgatcaggccgtactcctcgtcatccaggtcgatgtcagcaggctcgccctcctgggcatcctctgagacggcggggaaaaaggccatgtagacttcgttgttgtactccagggtgtccaggtgctccagctcgaagtcattgccgtcctcgtcggtgacggtaataaagtcagggccgaattcttcactcatggagatccctcccgctgttttgttctggacctattgtaccccgacttgaagaaaaaagcaaggcccggaggccccaaattttcacaggggagaaaagcgaccttttgcccggtggaaatcataaaggtggacaaacgggaatattatgatataatatgctagatatccggtgtcccgccccgtccggggcggctgccggagcggaggatctatcaactgcccgggggcctgtccccaacggaggaagtaacgtgtcagaagaacagaacagtcgtttatataacgagaacaacgattacggggagcgggattacgccccccgcaagtccggaaaaaagaagaagcggaaggagagcggcggccatgtgggcaggtgcatccttcaggtgctgggcaccctgctgcttgtggggctgtgtacgggggcaatcctgtgctgcttcgccgccgtctatatcaagacggtcatcatcccggaggctggagccgtggacctgagccagttcgcggtgggagaaaacagcgtgatgtactacatggaccaggacaccgggaactaccgggagctggtcactctggcggcagaggagaacgccgagtgggtaaactatgaggacatccccgaagacctgattaacgccaccgtggccattgaggaccggcggttctgggagcacaacggtgtggactggaaacgcaccgctgcggccatcctctacatgttcactggtcaggatatccagggcggctccaccattacccagcagctcatcaaaaacctgacccagtacgacgatgtcaccgtcaagcggaaggtcatcgagatcttccgagccctccagttcgacaaggactacaccaaagagaccactctggagtggtacctcaacttcatctggctgggggaccgctgtcggggtgtaggggcggcggccatgaactactttggcaagcccgtgcaggagctcaccctggcggagtgcgccagcctgatctccatcaccaataaccccaccatctatggcccttactccgatgctgtcttcaccaactcggagaccggggagcagaagactgcccgggacaagaacaaggagcgtcaggaactggtgctgtggagcatgctggaccagggctatatcactcaggaggagtatgatgaggccgtggcccaggagctggtcttcgaccgggcggcgggggagtccactccctctaccatttactcctggtatgaggagcaggtcatctccgatgtgaaggacgacctgaaggcccagtacggatacagcgatgaggcggtctccctgctgctgaccagaggcggcctgtctatctatacctgtgtggacccggatgtccaggcccaggtggagcagatatacagcgaccgcaccaacctggactacacttccagcagcggtcagcagctccagtccgccatcaccgtcatcgacaacgagacgggcaacctagtgggcatcgccggccgggtgggggagaagacgggcaacctgtggatgaacttcgccaccgacagcaagcgtcagcccggctcctccatcaagcctctgtcggtgtacgcccccgcctttgagatgggcctcatcagccccatctccgtgctggatgactatccccacgaggtgatgggcggccggccctggccggtgaacgtggacggccgctaccggggactggtcaccgtgcgtcaggccctgtccaactcctataacaccgtgtccgtgcgggtgctggccgacttggtcaccccggagaacagcttcaactttgtggaggagcacttccacctcgatttggaggatggtgtggagataggcggccagatgaagagcgacatcggggtggcccccctttccatgggcggcctgacctacggcgtcaacacccgggacatggcggaggctttcgcggtgttccccaacggcggcctctatcagaagtcccgcacctacaccaaggtgacccgggaggtggacggcgtggagaccgtactgctggaaaaccagcctgagtccgaggccgtgctcaagtcggagaccgcctactatgtcaactccatcctgcgggaagtggtcacccgggtcaatacgtcgggcaactttgacagcggcatggccatcgccggcaagaccggtactaccgatgacaagtacgaccgctggttcgtgggctacaccccctactacaccgcggcggtctgggtgggctttgagcaaaacgagcgggtgcctgcctccgggaacccggccctgaagatgtggactctggtcatgtccggtgtccacgaggggctggaagaccggaagttctctgagcccgccgggctgaccaccgtcacctactgcctggacagcggcctgctggccaccgactactgccggatggacccgcggggggaccgtacagccagaggaaccgtcttccagggcgatgcgccgaccgaattctgcaccagccacacggcggagaccactgttacggtatgtttggactgccccatcctggatggaaacggtgaggagaccggcctgtaccacctggccggggaattctgcccggaggagagccggcaggaagtgagcctgctgggctaccagcgggaggatgtgggaggcgccggcgcagaggacgccaagtattttctgggtgtgacccaggaggccgggccctgtacggtccacactgcggcccagcccgacccggatctgccctttgatcccaaccagccatgggaccccagcgatccgtggaatcccaacaccaacccactggatcccacagggcagggcggcgggggtgccgccgaccctggacaggaggacccggacgcgcctcagggcggagagacggaggaccccagcgggacggaccccatcatcaacccggagacagggaggccctacggatattgaagaaaaaacgggcccgcggagcatcgctccgcgggcccgtttttcgttctgcaaacagagcggatcccatatgccgaagacacgtgggagccgcttgttatctctatattttacttagaaaaggatctctctggtgatctctttcagactgtggaccccgcacatagccatggtgtcctccagctcccccttcagcttctgggtcagcagggccacgccctctgctcctccgccgtacaccgccgtgacataggggcgggccagcagaacggcgtcagcacccagcgccagtgccttacacacgtccacgccgctgcggataccgccgtccaccaggatgaccatctgatccctcaccgcgtcggcaatggcgggaagggcttcggccgtggcggggacaccgtccagcacccggcccccatggttggataccacgatgcccgccgcgccggcctccagagccttgcgggcccccttcacggtcataacgcctttaatcaggaaggggacttcggcgtactccacgatctcccgcagctccgccaccgtcttgctgcccgccgggggctggagccccttcaggaaggggaggccggcggcgtcgatgtccatggcgatgacctgggcgccggccgccttggcctcgtccagcttggagaagagtgtgttgcggtcccagggctttacggtaggaatgcccttcccgccggaggcaccgatggccctggctgcggcggtgaagactgcggggtcggtcccgtcgccggtgaaggcggcgatgccggcctgggcacaggccgggaccagaatgctgttgtaggcctggtcgtcatatttttcgccgtagtgcagcttggtggcgcccaccgggccggcaaagacgggcagatcgtactgctgcccgaagaaggtgtaacgggtatccacaggcttgttttcgcagatggtgtccagatccagccggatgctctgccacgcctcataattccggacggcgacggtgccctttgctcccgggccgggcatggagctgccgcaggcccggccattgcataccgggcaggctttgcagtaagggccgctgcatcccctggcggcctgcaggacttcagaataggtcatggatcttcctcctcgcgttttctctcgttattgtatcggctgggaggcggcacgtcaagaagaacaggacagcccgccgagccctccaaggggcacggcgggctgctctgctgtttcagcggcggtaggtgcgggtgatctcacgcagcttaccggagacgtaggggttgaaggcctcctgacggacccgccaactccaattctggctgcccatagtgccgggggtgttcatccgagcgtcgctgcccagccccagtacatcctggaggggggcgatagccaggcggctgggagcggcccaggcgccggagatcacaccccagcccagcccctcgtcctgccggagccggagatagcggctggcgaacaggcgggagtcgggatcggtctccctcagccactggaggaaggtgggggtgtcatgggtgccagtatagatgacggagtcccgctggcagttgtgggggaggtaggcgctctcccccacggggtcgaaggcgaacaccatcaccttcatgccggggatgccgcaggtacggacgaactgcagggcttcgggccccaggtcccccaggtcctccgcaatgagctccagctggggggcggatttttgcagggcatggaggagctccatccccggtccatcctcccaatggccctcccgggcattctccgcgccagtggggacggaccagtagctgtggaaagcccggaagtggtcgatacgcacggcgtcatagatggcggcgcaccactggatgcgccgcttccagaagtcaaagaccccctgcttgtttcccttccagtcatagagggggttgccccacagctggccctggtcagaaaatgcgtcggggggaacgccggccgaggcggccagatggcccttcccatccagctgaaagagctcgggctggcgccacatctgaacgctgtctggggagaggtagaaggggatgtcacccatgatgcggatacagcgccggctggcatatttcttcagagccatccactggcggtagaaggtctcctggaggaaacggtgaaaatcaatctcctccggctccggcggaggggcgtcctcaggccactgccagaaaggggcttgataccggtcgtggagggcggcgaaggtgcagtaatcctccagccagggcaggtctggggcgtcagactggaggtgggcggtttgggagcgttcccaggccttccgcagcagggggatacgggtctgggccagatggtcgtaatccacccggtccgggtcgggccagcgggccccgtccagctcctggggggtgaggagcccctcggccgccagttcatccaggtcgatgagataggggttgccggcaaaagcggagggggacatatagggggaggagccgtcccccggtgggacaaggggcaggatctgccagtagtgctgcccggcctcggcgagaaaatccacgaaccgccgggcgggtccgcccagggagccgatgccgtaggggccgggcagagaggacacggccagcaggatgccgctggaacgatgatcttccatgaaacgatgcctcctaaacgggaatatggcaagccccgctggtgaccagcggggccgtgcatgtgctgaggggtcgccttatgggcattataccacaaaagaaaaggaaaggaaagggaaaattgtgcaatatttccgttcatttcggggaaactgggcgaactgtgaccttgccttgggagacggagacctggagcgtgtctccggggaccagggcaccccgcagcaccaggtctgcggcggggtcctccaccagagaggagaccgcgcggcgcagagggcgggcgccgtactcccggtccccgccactgcgggccagcagttccaccgcaccctcctccgcagacagagagacgcccagctccgccaggcgagcccccgcctggtccagcagctgccgggtgatggagaccaaggaagtgtggtccagtgggtggaagacaagggcggcgtccagacggttgaggaactccgggggaaaggacttccgtgcgtcggccagcacctcccgctccagggcggtccggtccccctcagggccgggggagaagcccaggccgggtccccgcacgaagcgttgggaacccaggttggaggtcatgaccagcacggtgttgcggaaatccgttttgcggccccggctgtcggtaagcatcccctcctccatcacctggagcaggatggaccagatatcccgatgggccttctccagctcgtccagcagcaccacggaccagggggagcggcgcaccgcctcggtgagctgtccgccgtcctcatggcccacatagcccgggggggagccgatgaggcgggagacggagtggggttccatatactccgacatgtcgaagcggatcagggcgtcctgactgccgaagaggacagcggccagggcccggcacagctgggtcttgcccacgccgctgggacccaggaggaggaagcagccggtgggccggcggctgtcttttagtcccagccgtccccgtcggatggctcgggccacctgttccactgcggcatcttggcccagcagctgcccgcgcagatggtcctccagctccaaaagggcccggcggtccccatcgtccagatcggtgaccggcaccccggtccattgggagaggacctcccggatgtggcagggctccaccgagcgccgctcctggctggcctgccaggcccggcgggagtgattcagctcctcccgaaaatcctcctccgcgtcccggagcatggctgcctgctcgaagtcctgggcccggatggcctcccgcagctggcggccggtctggacggcccggagctccagggcttggagctccggggggagggagcgcccggccagccgggcccggctggccgcctcgtccaccaggtcgatggccttgtccgggagaaagcgctggggcagatagcggcaggacaggtccaccgccgcctccagggccttatcggagatggagaggtggtggtgcccctcgtatcggccccgaagaccctgtaggatggccagggcctggtcacgggtgggctcccggaccgtgacgggctggaagcggcgctccagggcggcgtccttctcgatatagcgctgatactcgtccagtgtggtggcccccagcacctggagctccccacgggacagagcgggcttcaggatgttggcggcgtcgatggccccctccgcgctccccgcccccacgatggtgtgcagctcatcgatgaagaggatgatgttgcctgcccggcggacctcctccagcacgtgtttgagcttctcctcgaactccccacggtacttggtgcccgccaccatggcgcataggtccagagcgcacacacgcctgcccagcaggtgggagggggcggtgccatcagcgatggccagggccagcccctccacaatggcagtctttcccacgcctggttccccgatgagggcggggttgttcttggtccgccgggacaggatctggatcacccgggtcagttcctcttcccggccgatcaccgggtccagctgtccgtcggcagccatccgggtcaagtcccgggcgcactggtccagcaggcgggtatcggtgctgcgctccggttcccggggtcggacggagcgggtggggagttcctcgccccccagaaaggctgccagtccctgggagagctggtccagatccgccccctgctccgccataaggcggcaggcggcgcactcacggtcctggagcagacccagcagcaggtgctccgcgctgacagcgttctgccccaggcggcgggaggcggccgctgcctgctggatggccaggcagcacttgggggtcaggccctggtggagggaccgagcgggcacgccggtgcccaccagctgggagatggcggagcgcagggagcggctgtccaccccgctgctctgaagggaccgggcggcggcgctgtactcctggctggccagacccagcagcaggtgctcgctgcccacatagctgtgcccaagccgggcggcgttctcctgggccagccgcagggcgcccagggcggtggaggtaaagcggcattctggcatacatatcacctctggataggttttcctctcagtatttccaatttcaaaaaaattatcattgcatttttcaaaacttgtgataaaatgagactagatttttatggaggtgtttcccatggcttacaagattagcgatgcctgcatcagctgcggctcctgcgccgacggctgccctgtgggtgcgatttctcagggcgattcccagtatgtcatcagcgaggatgcctgcatcgactgcggcgcttgctctgacacctgccctgtggatgccatttcccagggctgattggcaacaaaaaaacagcgccggcgtgtgcggcgctgtttttttatgctcaaaagggcctgaaaagcaggagactgtgtaatatgacggatattttcggcgggacgggaagaaaatctctatttttcgtcaaagatttcattgaagcggtccgccgggtgtgttacaatggaccacaacacaagaacaaatgcccttgcaacacggacacggggcggggatgacgcatagtctggagggagacgcagttgagcggaggggcgaagtactttatcgtggaggcagaggccatgccggagatcattcggaaagtggcggaggccaagcgcctgttagagaccggggagaagaccacggtgaacggcgcggcccgggaggtgggcatcagccggagcgcgttctataagtataaggacgcggtgcatccctttcaggatatgctccacggcaggatcgtcacactccagaccgtactgcgggatgagcccggcgtgctctccggcgtgttgaacgtgttcgccggtacaggcatcaatattctgaccatcaatcagaacatcccggtcaacggctgtgcggtggtgaccatcacggcggagacctctgccctgcggcgctccctggaggagctgctggccgccgcggggggcagccccggcgtgctgcgctgtgagatcctggccggataacgggccgtgtttttagattatcgtggaagagattcatgaggtgaacggaatggtaaatgttgcgatcttaggctttggcactgtgggctccggcgtggcagaggtgctcaccaccaacggcgggctgatcgaccagcgggtggagaatctggtgcggctgaaatatatcctggatgtgcgggatttcccggacagcccgtaccgggactgcttcgtcaaggactttggggtcatcgagagcgaccccgaggtggacatcgtagtggagactatcggcggcgccacggtggcgctggactttaccacccgggcgctgaaagcgggcaagagcgtggtctcctccaataaggagctggtggccacccacggctatgagctgctccagctggcccgggagcacggggtcagctatctgttcgaggccagcgtgggcgggggcatccctatcctgcggcccctgacctcctgcttggcagccaacgagctcagccaggtcaccggcatcctcaacggcaccaccaactatatccttacccggatgatcaaggcgggcctcaccttcgagcaggcgctgaaggaggcacaggagaacggttacgcggagcgggacccctccgccgacgtagacggacacgacgcctgccggaagatctgcatcctggcagccctggccttcgggcagcacgtctaccctgaccaggtgcccacccagggcatccggggcgtcaccctggccgatgtggcctatgccgactcctgcggctataagatcaaactgctgggccgggccatccgggagggggagggaaagctctgcgcctttgtggccccccatctggtgcccgcctccaaccccctgtccggggtggaggacgtgttcaacgccatttccgtcaccggaaacgccatcggcgacgtgatgttttatggccggggagcgggcaagctgcccacggcttccgccgtggtggccgatgtcatcgacattgccaaggatctgaagactgcccggtgtgcggtctggggacccgggtcccgggacctggtggtcagttccgacatcctcagctcccgctggtatgtccgggggacggcctccatggacaaagtccgggccgccttcggggagatcagccccctggcaaggggaggtgcgcctgccggggagaccgctttcctgaccgcacccatgacggagccccaagtccgggccaggctggaggggatggagctccactcccttatccgggtgctggagtgaggaacgccgccggcatagaatggtgtgcagagtcctgcgcgctgatcgagaattgacctttagggggaaacagatatatggcattgatcgtacaaaaattcggcggcagctccgtcgccgacacggcccgcatccggaatgtggcccggatcatcacggagacatatcgcaaaggaaacaacgtggtggtggtcctgtccgcccagggggacaccaccgatgacctgattgccaaggcggaagagatcaaccccggagcctcccgccgggagatggacatgctgctggccactggagaacagatctccatctccctgtgcgccatggccatcgaagctctggggtatcctgtgatctctctcactggctggcaggcggggatgctcaccaactccgcttacggcagtgcccggatcaagcgcatccgcaccgaccgcatacagactgagctggacgcccggaagatcgtcctggtggccggcttccagggcatcaataagtatgatgacatcactaccctgggacggggcggctccgacacctcggcggtggctctggccgcctccctccatgcagatctgtgtcagatctacaccgatgtggacggcgtgtacaccgccgatccccgctcggtcaccggagcgagaaagctggaagagatcacctacgacgagatgctggaactggccagcctgggggcgcaggtgctgcacaaccgctcggtggaaatggccaagcgatacaacgtcaatctggaggttctctccagcttcaccgggaatccgggtacgaaagttaaggaggtcgtaaaaaacatggaaaaatcccacgtcagcggtgtggcgaaagataaaaatgtggcccggctggccttggtgggcctggccgacgagcccgggatcgcctttaagatcttctctctcttggcaaagaaccggatcaacgtagacatcatcctccagtccattggacgggacagcagcaaggatatcagcttcaccgtggcccggggcgacactgaacgggccaaggcgctgctggaagagcacagggaggccatcggcttccgggagatcgaagtgaatgagcaggtggccaaggtctccatcgtgggggccgggatggtaaacaaccccggtgtggccgccaggatgtttgaggccctctacggtgccagcgtgaacatcaacatgatctccaccagcgagatcaaggtctctgtcctggtgaatgagcgggacgcagaccgggcggtccaggccatccacgaccgcttcttcaacgaatttggaggcaacgcctgaacaggcgtcaaagcgatgcagcccccctcatggcccggtcccgggccgcgagggggtgccctgttttcaggttttcgcccgtttttgccggaaaaatccttttttagcttgcaatatttgtgccggtctggtaaaataataactcgactggatattcttttcccatccagtctgttttatccccccgccgggaggcagacggaacgggatgcgggctgactgaaaacgagaatctcagggttgccgcccaagggcgcccctgctgcaagtaaggagagaatcatcgcaatggacaagaatcagagagaagagcggcgccgtcaggaggatatcgcactgaaccggggcttgctctgggtcggggcggccatcctgatggagctgcttttgatgctggtcaataaatactatatcaactactactccacggtggagtccatcaatatggtctacgcctttgacgcgggcctgaaggcggtgcgcatcgtggcgctgatagccctggcggcctccgcagtgtggtgcttcctgcgcttctcccgggaggggcgcaccggcaccatgcccttggtcctggtggccgctttcagcgcggtgacggccatcgcccatatcacgatctgttttaaggacgccggcgtccgcatgctgttcctgctggtgcctgcctgggccgccctggcgctggtgtactacctgtatcagcgggagttcttttactccgccttctataccggtctgggcaccatgctcctgtggatgctgcgccacaaggacagcacagtggacccctcctcctcccggctgactacgtacgtgttcctggccatcgtggccatcctgatggtgctggggctggtgatgctgctccaggccaggaagaacggcggcgtgtggagcctggcgggccgtgaggtccgtgtccttcccgcagaggctggatactccctgatcttcctgaccctggccgtcaatgtggtggcggtagccgccgccgcagtgatgggtggaaatgtgggctactatctgatttatgtgctggtggcctggctcttcgctctgctggtgtattacactgtcaaaatgatgtaagagcggcctgaggaaaagtaaggctgcggtgtgctttgacgcctccgtagaaaagtgtcaggagacgcctatactgtgcggccagcaagtgaaatgtggaaatttaaagagggactatcggtgaaaagccgatagtccctctttttgtgctgcactgggcacagatagagccggaatacaagaaatgccggctgtcaaaggaggcttctcctggcagacgacgtttcattgtccttttggaagatatttcttttgtcaatgctcatgtgcggtaaagagcacataaggatttgacagacagcctcccactattccggcttaatgggaatttcaatttgagtgatataatcgtctatactatcaataaccaactcattgatccccgtttcataagcatagccacacagagttgtcccttgcttttttgcataggcaaggatttctttgtatctttcgggaagattttcccaatttcccttacaaaaagcccttaggtatgttccggcaggctgcagatgcagtcctcttttggaaacaggaaaaggcatttcaatatatatggcactatactcgctgaattttccttgatataaatgctccactggaagcatggcaccataggaagcgtcatgcagacggcgaagttggtgtttttttgtttcggcaatgacccgttcaatttcttgttcaaatgataagttttcagccatatcaacagccaccaaatagcggctctgcttttccacaaggctgatttctgcaatatccaaagagcgcagcatatccatatcctgctgctggttgatcagaattttttggatagatctcaaatgggaaatggtttgatttaattctgtgattttttcttgcaaaagagaagcgaagttatcaatggtacggttttccataaattgtttgatttcatcaagagatacatttaactcccgcagcattaaaattgtttccagtgccgcactctgctggtagctgtaataccgatagccgttttccttaatacaggcaggtttcagcagaccgatctcatcataccacatcaaagtttttttgttgatttcatggagcgccgcaaactgccctatggtaaacagtgcagctttttctttcagcatttttgaagatcccccttgactgtactgttactgtacggtttattatataaaatgttcagagaaaaaacaaggaggatctttatttatgctgagcgagaacgcatacagccgcccggtaacattgaaaaatgttttgagatttgctgtcccgactatcgttatgacggtattcatgtccttttataccatggtggacggtctgtttgtatccaatctgattggtacagatgcactgtccgcggtcaatttgaccgccccgattatttcactggtaactgcgatctctaccatgcttgctacgggtggaagcgctgtcattatgagaaaggtaggagagcaaaaagcaagggaagcaaatgaggacttcacatttctaattgttgtgaatgtgatcgtagggcttgtcatgtccgttttaggttatcttgtcatggacggcatctttggaagcatgaacctttcgccggttgtatttgatcactgccacgattatttgagccgctatttgattttcacaatccctatcctgctgatgaataactttaccctttatatgatcgccgccgggaagtcagatctttctatggtctgctccattacaggcggcgtgttgaatatggtccttgactatgttttgatcgctgtacttgatatggggattgcgggggcggcgattgccaccggcttggggtattctgttacggcggtagtgggaattgtgctgttttccaagaaaaacagcctgcttcattttgtaaagccggtatgccggaggaaaactttgtgggaagctgccacaaatggcagttcggaaatggcgaccgccttagtgacaggtatcgttactatgatgtttaactggacaatgctgaaatatgtaggggaaaacggcgtagcagccattaccatcattatgtatgtgctgatgttcgccacttctctctataccggctattcctacggagtcgcgcctatgatcagtttttactatggcgaacaaaatcatggaaaattaaaaaagctgatacgtatgagcttgaagatcatcagcgtgatcgctgctgtgaccctcatcgcttcgctggtcgttacagagccgcttgtctcggtgttcgcccgcccagataacccagtatatgatttggcggttacaggaaaccgtatctgttcctttgcccttatctttatcggctttaatgtttttgccagcggaatgtttacggcgttatccaacgggctgatctcagcggtgcttgctttttcacgctcctttgtattcatggtgatcgctatgctgatacttcccgcacttttcggcgtaacaggtgtgtggtttgcgacacccgctgcggagtttgcggcgatctgcctatctcttattatgtttggcagataccaaaagaaatatggatattaacaggaacgatcatttatgatgtggatttttggaattgtcttgatttcaggcatgaaagcgcttttatgcaagggattttcgttaggagggtttctgctgctgttttggatcaaaggcaggcagctccgatttaactctgacgagtgggatagctttttcatttcacttccggaaagaaagctgcaaaagtatgttatctgtatctatctggtggctgctatgttctcttcgtttatcagttatttcattcttgagttgactggataccggaatagcattggaatagcgatattgatctttgcagttggggtactgatcacagcctgcaaatggcatacaaaagaaagggactatctgctcagacggtatcgagaaataccagacacgatccttgaaagacagaagcaagaagcggaggaaatagaaaaaagtgagtgaactgattactgaagggaatatcagaaagcagactgttcttgaagcgcatagcagctaaggtgttatgcgggcgtcggctcgatcagcatatttgaaagaatatttgcttgccttggttgcaataggaatgagtttgtctggtatttcccaggagcttaaactcaaaagagcccagtaaacagcggacctgcctgagccagtcagcacggcaagtgaatggggctgcgctcaccgctgacagccccgtctgccctcgccgcctgccaggtgtgagatccaactggccgatctgtatcctgccccgtggataaaatggacaaagactcttagaccatcacttatctgttccatttttaatatgtgacatgttaacggggaaattgagattgcagagagcgccgttcagaggagctgtttttgaattgtgcggcggtagaggagtgcggcggcaaagcaggagatcagctccgagaggggaaaggcggcccagaccagggccggcttcagggccagcagaagggcagcggcggggagcaggagcaggatctggcgcagcagggccaccagaagggaccagcggctgcggcccagggattgaaaggcggagcagaagataatgctggtcccggcgaagaaaaaggagagggcgatgatccgcagagcgggggcccccatggccagggcctcggggctcgcccggaaggcggagcggagcaggggggaggccagcagggagagcagcagggccccggacagggagaggacggcggtgaactgctggccaaaacggacagaggctgacacgcgccggagtgccccggacccgtagttatagctcaaaatagggatcaggccgctgctgatgccgaatatgggcatgaagataaaggtctggagcttgaagtaggcgcccagtacaaagaccgcggactgggaccaccgggtcagcagctggttcagccccagggacatgaagctgctcagcgactgcatcaccacggcgggggcggcgacgcggcccatctcagccagcatttccccccgggggcggaagccccgcaggcggatggggagctggtgccggaggcggtacaccagccagaagccgatcaacgcgccggagatctgaccgatgaccgtggctgccgcggcccccgcaactccaaggtccaggacgaagatgaagatagggtccaggatcaggttgaggatggcacccgagccctgcacgatcatgaagccggcggggcggcccatggcctgaaggatgcgctccgtcaaaaactgcatgcaggtgccgatggacagtccgcagcagatcagcaggtactgggccccctgccgggcgacggaggggtcctctgtggagaggcgcaggaagggggcggcccctgtcagggcgaaaagaaggaagaggagccagcagagtccgtaaaggaaaaacccgtgacagaccgcagaagcagcctgttcctggtctccctcccccagccggcgggagaaaatggcgctgaagcccaccccgatgccagagcagaaggccaccagcagcatctggatggggtaggcgtaagagagggccagaaaggcctcgtcgctgtactgggccacatagacgctgtccaccagattgtagacggcgctgatgagcatggacagcatgatgggcagggacatagtcaccaccaaacggggcaccggcatggcgcccagcataccgtcattggactgacgcacagagctctcacctcctgttttaccgatatggggcggcatcatggcagggaacgggtgtagcgcaggtccacgcagatggtgtccggcgggaaggggatgtcctcgtgggtcccgtcccaggcaaaccccattttttcgtagaagcggcgggcgttttcattctcccgcaggacaaagagaaagacctgaagatagccctggccgctcaggcggcggaggacttcctccatgagcttggtgccatagcccttcctcttatggtctgggtgggtataaaaggagatgatctctccccagccctcatatcctcgggagttgaacttgcacaccgtacctgcctggagacctgcatcgatccgggcggggccgaaggtggcacagcagacgggaatatcctcatcgtataatagaaggagttgattgcgatttgttttcagattttcccggaatgtggggacccagcggtcatcggtgatctcccgggccatgaagtcggcggggatggcgccggcgtaggtggtccgccagcccagggcgtggatcagggacagggcggcgaactgctcctctgtgcgggcctcttcaaaatgaaggcgggacatggacagcgctcctttcagaatgttctgctctactgtcttcgattatatccgtccaattcccggttggcaaggaggaaagcgccgctgggcccccgccgccgaaggggaggccggccccggaaggcagaaaaactggacagaaggtggaaattgtacaaaaagtcctgaaaaaggggtggaacgggaaaaaggcacacaatatatccgcctttttggaaaaaatgagaggtgaaagaagaatgaaatgggagggaaataagaaaaaaaggaaaattccccttgcttttttggacaaattcacatagtattggagcagatacccccacagcaggtccgctgcgttgagatgggggaagcgggtggtgagaatatggaaatggactccattcaaaaggtagccggcgcagagcaggagagccaggagcgccgggaggcggctgcggcggagagccgacggaccgtagctgaggcccggaaggcagctgaagagctgctggaggaggcccgccgccaggcgggggctgagacccggcagatgctggcccgggcggaggcggacgccgcggaggagacgaagaccatcctggcggaggcggagcagcgctgccaggcgctgaagcagaacgcccggacccgtatggatcaggcggcgaagcgcatcgtggaaggggtagtgaagggctgatggcgatcgtcaaaatgaagcatctgcgcctggcggccatgcagtcggaccgggaggccctgctgcggctgcttcaggggatgggctgcttggagatcgaagagccgtcggtggactggagcgatccggagtgggccgggctgaagagcccggacagcggggcgctctccgccgcccgggaggagaaaaacgcagcccagcacgccctggaggtgctcaagcgctacgcaaaggtgaaggggggcctcctgagccccaggccggtggtctccccccagcagttttttgaggagcaggcgtaccgaagcgccctggagaccgccagagccatcaatgatggggagcgggagctggcggcgctgaaggcggagcgggacaagcgggctgcccagcgggcctccctggcaccgtggatccccctggagctcccccttgacacggcctccacccgggaggtggaggtgcagttcggcacggtatcggcggagacccccttcccccagctggcgggggaggtgcaggcagtgagtgagctggcccagttgacgctggccagcgcagaccgggaaaaccagtatctgctgctgatctgccaccgttccgccttggacgaggtgctggagaagctgaaggagcacggctggtcccgggcagtgttccgggatctgacaggcacggcggcagacaacgaccgccggctggagcaggagatggaggagctgtctcagcgcagggcggagcaggagcggcggatcgccgcccaggccggccagcgggaggcgctgaagcgggcggtggaccgagccacggtggagatcgaccgtgaggagggcaagagccgcctggtggagacccaggtggccttcttcctggagggctgggtgccggaggagcgctgggaccagctgcggcaggccctgtccgactacccctgtgcctgggaggtccgggacccagagccggaggaatatccccaggtgccggtgcagctgaaaaacaactggctcacccggccgctgaacatggtcacggagatgtactccctgcctgcctacggaagcgtggacccaaaccccctgatggcccccttctttatcctgttttacggcatcatgatggcggacatgggctatggcctgctgatgatgctggcctcggtggtggtcctgcgccggatgagacccaagggcaccatgagccacttcttcggtctgctgggactgtgcggcgtcagtacctttttgatgggagcggtcacgggaggctttttcggtgacatgatccctcaggtgctgaagatcctgaatccggagagcaccttcgtctggttctggccgcccctgttcacccccctggatgacaccctgatgatcctggtgggggccatggccctgggcttgattcaaatcgtcacgggcatggctatcagcttcatcaaaaagatcagggaggggcagatcctggatgcggtatgggaggagctgacctggtggatcgtctttgccggtctggccctggcagtgctgggggtgaccaacgtggtcatcatcctgggcggcgtcatggtgctggtgggctcgggctggaacgccaagggcttcggtaaggtgaccgccgtgttcggctccctgtataaccatgtgaccgggtactttggggacatcctctcctattctcgtctcatggccctgatgctggcaggcagcgtcatcgcccaggtgttcaatactctgggcgcgatcccgggcaacctggtgatctttttcatcatctccttggcaggcaatgccttgaactttgccttgaatctgctgggctgctatgtgcatgacctgcgtctgcagtgcctggagtattttggaaagttctatcaggatggcggaaagcctttccggcctatggcggtgaacacccggtatgtggatatcaaagaacaatgatttgaggaggatacaaaaatggatatgtcacaagtggtagagtatggacagagcatgactttcctgggcagcatcggcgggctggccctggccctgctgggggctggactggcggctgtactcagcggcatcggcagcgcaaagggcaccggcctggccggcgaggcgggcaccggcctgctgtgtgaggatccctccaagttcggcaaggtgatgatccttcaggtcatccccggcacccagggcctgtacggcctggtagtctggttcttcgccatcttccgtatgggcctgctgtctgggaccctgcctcagctgaccatcgcccaggggatgcagtatttcgtggcctgcctgcctatggcgctgggcggcctgttctccgccatcgcccagggccgtgtggccgccggctccatcaacattctggccaaaaagccggatgactggtccaagggcatggtgctgtgcatcactgtggagttctacgccatcctctccctgctggcctccatgctgatgatcatcaacatcagcgcctgagcgccggaaaggaacagctatggacggacttgaaaagatcacggccaggatcagcgccgacgcggacgcggagatccatgccattcgagacaaggcccaggcccaggcggaagaactgctggcccaggccagggcccaggcggagaaggagaagggcgagctgctcgcccggggccgccggtccgcggaggagcggaaggcccgcctgatctctgccgctcagatggaggggcggaagatgtccctggctgccaagcaggaggtgctggacgaggcgttccgccaggctctggaggagatgtgctcgctgccggaggagcagtacatccagctgctggcccgcctggcggtgcaggcgtcctccaccggccgggagcagctgatcttctcccccaaggaccggacgcgtatcggcaaggcggtggtgatggcggccaacgacgctctggtgaagcaggtggctccggagctgcccgacgccatcaccgactccaaggtgggggccttcctgggcaaggtggtcaacagcgctgcggcgcagatcaccggcaccgggcttttgaccctgtccgaggagacgaggcccatccggggcggcttcatcatggtggacggcccggtggaggtcaactgcgcctttgaggccatggtgcgtgcccagcaggagcagctggaaaagccggtggcggagatcctgtttcaaaagtgaagagtgaggagcggagcgggggaacggagggcccgggtgcccattgccagattccgcaggaagcaaagactgcccgcagagatacgcgcggcgctctgctctgacccgaaaggggtggtattttgtcccagaaacgagatacggattatttagccgtctccacccgcatccacgcgatggaaaaccgcatgctgacccgggaacggatggagcggatgatcgacgccaaggacagcggcgaagcagccaaggtgctcagcgagtgcgggtacggcgagctgacccagctgacctcggcggcgctggaagagctgctggccgatgcccggcggaacaccttccgggacatggcggactcggtgcctgaccggcggctggtggaggtctttcagctgaaatacgactaccacaacgccaaggtgctgatcaaggcccaggccatggggctggacgaggcgcgtctgctctcccagggcgggcggtacgatccccagcggctgcgggaggatttccttcgggatgaccttcgggactggggcgaggtgttccgccaggcggtgctccgggccagggaggtgctgtccgccaccggagatcctcagcaggccgacctggtgctggaccgggcctgctttcaggagatggagagcctggcacgggcatgcggcagcgctttcctgcagggctatgtccgcctgtcggtggacgccgctaatctgcgcgccgctgtccgggcagcccggatgggcaagggcagcgagtttttgaaccagatcctgctccccggtgggaacgtatcggagcgcgccctggccggagcgagaccggaggaactggcagagcgcttccgcagcgggcccctggcccaggcggcggcgctgggggcggcccggacccagccggattctggtcctctcaccgaatttgagcgcctgtgtgataatgcggtcacgggatatctggcctcggccagccgggtccccttcggggaggagacggtgatcggctatctctacgcccgggaggcggagatcaccgctgtgcgcatcatcatggcgggacgcatggccggcctggatggggagaccatccgcagccgcctgcgggccacctatgtataagggggagaggagcatgtataagatcgcggtggtgggcgaccgagacagcgtgctgggcttcaaggccctggggctggaggtctgccctgcccagagcgcggacgaggccagagagatcatccaccgtctggcgaaagagaactgtgccatcctctacctcacggagcagctggcggtccagctccagagtgagcttcagcgctataaggacgccctcacccccgctatcatcctgatcccgggcaaagagggctccctggggatcgggatggccaatgtgaagaccgccgtggagcgggcggtgggggcggatatcctatgagagatggattcggtaccttccgcagggcggcagcaggggaggcggagcaggtctttgacctgatccggcagcggatcgcctggatggatgagcggggcatccagcagtggaaccaccccggctacctcaggcggtatcccttggactatttccggcagtgcgctgaagagggacagctctacgccctgtggacggagtgcggcgctctggccgcgggggccgtggtgttggaggaggacccgcgctgggccggctatggcgggaaagcgctctatgtgcataatctggcggccagcctccacttctccggagcgggcacggagctgctcaggcgctgcctggccctggccgcggagcgggggcaggactatctccgcctggactgcgcccgggacaacccggttttgcatgattattatgaacgttttggcttccgatttgtggcgcctgtggaggaccaggggtatctcggggatctccttcagtaccccctggggtcccgggactgagcgggacggcggcacaggaaggatcagaaagaaggtttgagccaatgggaaaaatcgtcaaggtctccggcccgctggtggtggccaccgggctccaggaggccaacatggccgacgtggtccgggtgggcgagcagggcctgatcggagaagtgctgaccatgaatggggacaccgcctccatccaggtctatgaggagacctccggcctgggtcccggggcggaggtggtcaccaccggcgcccccctgtccgtggaactgggccccggcctgatcgagaacatctacgacggcatccagcgcccgctggaggtcatcatggagacggtgaagggaaataacctccccagaggtgtggaggtgcccgccctggaccgggagaagaagtgggatttccaggccgtggtggagccgggcacccaggtagtagggggcgacatcatcggcacggtgcaggagaccccctctatcctccacaagatcatgatcccgcccaggatgcaagggaagatcgtctccatccagtccggctcctacaccgtcaccgaaacagtggccgtgctggaacgggaggacggctcccgggtagagctgcccatgatgcagaagtggcccgtccgcgtgggacggccctataagcacaaatatccccctgtggtcccactgtcctccggccagcgcatcgtggacaccttcttcccggtggccaagggcggcacagccgccatccccggtcccttcggctcgggcaagacggtgatgcagcacgccctggccaagtggtctgatgtggacatggtggtgtatatcggctgcggcgagcggggcaacgagatgaccgacgtgctgcgggaattccccgagctggtggacccccgcaccggcgagaccctgatgaagcgcactgtgctgatcgccaacacctccgacatgccggtggccgcccgggaggcgtccatctacactggcatcaccatcgccgagtatttccgggacatgggctacgccgtggccgtcatcgccgactccacctcccgctgggcggaggcgctgcgggagatgtccggccgcctggaggagatgcccggcgaggagggctaccccgcctacctgtcctcccgcctggcccagttctatgagcgggcgggctcggtgtcctgtctgggctctgaggaggaccgcagaggctccctcaccgctgtgggcgcggtctcgccccctggcggcgacctgtccgagcccgtgtcccaggccaccatgcgcatcgtcaaggtgttctgggccctggactcctccctggcctaccgccgccacttccccgccatcaactggctcaactcctactccctctatctggactccctgaagccctggtacgacgagcacctgggccctgagttcctccagaaccgggagtgggctatggcggtcctccaggaggaggccagcctgaacgagatcgtccagctggtgggcaaggattccctgtccgccaaggaccagatcaccctggagacggccaagatgatccgggaggatttcctccagcagaactcctttgtggacatcgattccttctccgagtatgaccggcaggagaagatgctggccatgatccgaagctatgaccggcagtgccgggccgccgctgagaagggcggggcgctggccgagctgttcaccatccccgcccgggagggcatcggccgggccaagtctgtccccgccgaccggtatgtggaggcctatgcccagctggtccgccagatggaggagcagatctccgccgtggctgagaagggagaggaagcgctgtgattcgggaatataagacgatccaggagatctccggccccctgatggtggtggaccatgtgcagggcgtcacctatgacgagctgggggagatcgagctgtctgacggtaccatccgccgctgccaggtgctggaggtcaacggcgattccgccgtggtgcagctgtttgagagctctgcgggcatcaatctggcggagtccaagatccgctttttggggcaccccctccagctgggggtgtcggaggacatgctgggccgggtctttaacggcatgggccggcccatcgacggcggacctgccatcctggctgacgagtaccgggatatcaacggcctgcccatgaaccctgccggccgggactaccccaacgagttcatccagacgggcatctccaccatcgacggactgaacaccctggtccggggccagaagctgccaattttcagcgggtccggcctgccccacgccgcgctggccgctcagatcgcccgccaggccaaagtgctggatggggaatccaacttcgcggtggtctttgccgccatcggcatcacctttgaggagtcggagttctttgtcagcgagtttaagcgcaccggtgccatcgaccgcacggtgctcttcaccaacctggccaacgacccggcggtggagcgcattgccaccccccgtatggccctgaccgctgcggagtacctggcctttgaaaaggggatgcacgtactggtcatcatgaccgacatcaccaactacgccgaggccctgcgggagatctccgccgccaagaaggaggtcccgggccgccggggctaccccggctatctgtacaccaacctggccaccatctacgagcgggcgggccgccagctgggcaaggagggctctatcaccctcatccccatcctgaccatgccggaggatgacaagacccaccccatccctgatctgacggggtatatcaccgagggacagatcatcctctcccgggagctgttccgccggggcatcaatccgccggtggacgtgctgccctccctgtcccgcctgaaggacaagggcatcggcgtgggcaggacccgggaggaccactcgggcaccatgaaccagctcttcgccgcctatgccaccggtaaggagaacaaggagctgatgtccatcctgggcgaggccgccctcagccccaccgacctgctgtatgccaagttcgcggacgagtttgaaaagcgctatgtttcccagggaacagaggagaaccgctccatccaggagacactggacctgggctgggagctgctgtctatcctgcccaccgcggagctcaagcgcatcaagccggagctgatcgagaagtatctgccccaaaagggctaaggggggaccagaatgccttccacgaccataaatcccacccgtatggagctgacccgcctgaagggccgcctgcgcaccgcccagcggggccacaagctgctcaaggacaagcgggatgagctgatgaagcagttcatggaggtggtgcgggagaaccgggccctccgccgccgggtggaggagcagctgatgcgcgcccagagctccttcacggtggctgccgctgtcatgtccccggagatgctggagcagtccctgctctatcccaagcagagcgtagaactggacatgacttttcagaatatcatgtcggtggatgtgcctcagtaccacttcaggacccacagccaggacccgggggagatctacccctacggcttcgccaacacctcaggagagctggatgacgcggtctctgccatgtcccaggtgttccaggatatgctgaagctggccgagatcgaaaagacctcccagctgctggcggaggagatcgaaaagacccgccgccgagtcaatgccctggagtatgtaaagatcccggagatgcaggaaaatatcaaatatatcaccatgaagctggacgaaaacgagcgggccaacaccatacgcctgatgaaggtgaaggagctcctgctcagagacgccattgaggagcggagagaggccgacgccaaggcggtggaggccttcgccggatacccggagggaccggcaggcgtttgacgcccagcaggatctgcatgaaagagcccggatgggaccatagggtcccatccgggcttttcgcagcccgttcagctgtgccgctgagagtcggactgcgcccgggcccgctggaggacgaaacgcaggaaggcctgcatagaggggggctgctcctcatcccggcgataggccatatagatggtgcgcttgtagaggcggtccttcaggtgaaggagcttcacttggctgttgtccagcacatccgttttggccacgatggagactccgaagccgctggccaccagagaggagatgctggcctctccggtggcattgcagaatacctgaggcgtccagccgctctgggagatgtacgccatgatatcccggtagatctggacatggggcatataggtgataaaggggtagggggcgagctgactgagcaggatctggtcctccgcagccagcggatggtccggcggcacgatggccaccagctcctggtccagcagggggacgaactccacctccggctcgccctcctcgtagatacagaagaccacgtcatagaggaaggtcttcagcccgtccagcagctcccgggtgggcagctcccgaaagccgaaggtgacctgctcatagcctggctgctggagaaaggcccgcaccgtctcgggcatgaatttgggggagaggggggcgatgtagcccacgtcgatgtggccctgccccgggcgggcggcccgcttcagggtggcgttcacagagtccaggcggcccaggagggcgtccacctccttaaaatagagcaggccgtatttgctcagttccaggtggcgtccctttcggagaaagagggggactcccagctcccgttccaggctggcgatggcggcgctgagggagggctgggagatcatcagctgttccgcggtccggtggaagttcagctgtccggctgctgtcctaaaataatagagctgattcaatgtcaaattgctgcacctccccaaaaatgcggaaaaatatcctatatatttccctatattttattaaaaattgagaagtttgtcaagaaataaacaaatattgataaaattaaatctatcaaaaaggcaatgaattggtattttactttttgacggcttggctggataatagagacaggaaaaggaaaagaaaacccaattagatttgtgataatatccaaacaaagagctttagaaatgagggatcgatatggagcgttatcaggataaagtggtgctgatcaccggtgcgggtgacgtggccgaggcggctgctaagcggctgctgtgtgagggagcaaaggtggctttctctgacttctcccaggaggcgctggacgcagccatctccgggctgaaggccgaggggtgggacggggagcgccttatgggcataaagtgcgacgtgcggaagtatgaggagtgcgaggcggcggccaatgccgtcctggccaggtgggggcagatcgacaccctggtagccaccgccggcatcatccgccactgtcctatcgacgagatgactgaagcccagtggcaggatgttgtggacatcaacctcaccggcgtgttccacgcggtgaagtcggtggtcccctccatgaaggagcggaaatacggacatatcgtggtcatctcctccattggaggtcggacgggccgtcccggcgtgggtgtcaactacgctgccaccaaggccggtgtgaacgggttggtgatgtgcctgggctatgagctggggccctggcagatcacggtgaacagcgtggcccccggccccctgaagggaaagatgttcgccggcatgacccaggaccgtatcgaatccctgtccgccggtatccgcctccagaggatgggcgaactgagcgacgtggccgccgccatcgcctatctgggcagcgacgacgccgcctggaccaccggcgaggtgctggatgtgaacggcggcctccagtattgaggccggcagatcctttgtgcaaaagccgtgaaaacggcgctgatccatagctgatacataaaacgaggaggaaagacaatgaaaaaagcgattgccctgattctgaccctggccatgtccctgagcctggccgcctgctcaggcggtggaagcggctccggagccgcttccaatcccccggctgcttccggcggtagcagcacatctggtacggtctcttccggttctgcttccggggcctatgcggatctggagcctgtggagctgtctctggcagatgctgccgcggtgggggcggctggagagactttcgaccgcctgtttgcggagaaagtggaggagatcactggcggaaaactgacagtctatctctatcagaatggagaactgggcagtgacatggacatactttcccagatgcaggatggacaccttgatttagtgggctcccagatcgcagcggtcgtaaactttgtccctgagatggctatcttcgacctgcccatggtgtttgcccagtatgacggcgagaccatcgaccaggtgctcaacggcgacagccagacccatgccgccatgtccgccgcctatgagaccgccggtctggaactgctgggcatccagcagtacgccacctaccgcctcaccaccgccaaccgggacttgaagaccttggcagactttaaggggcttcagatccgcaccatggagaacggcaaccacatggccttctggactgccatcggtgccgcccccacccctctggcctgggctgaggtgtttattgccctgcagaacgggaccatcgatgcccacgaaaatgcggcggatactgttctcggggccaatattcaggaggtgcagaagtacctggcctgcaccaaccacatcctgtacgccaaccagctgtccatgaacaaggagaagtatgactctctggaccccgcctatcaggcggctatcgtgcaggcggtggaggaagccattgaggaaatgaaacctgaaatgaagaatattgatgagaccagcaagcaggctttggtggacgggggtatgactctcatcgaatatgatgattctttctatcaggagatcctggcgctggatactgtccaggccctatacgataagatcgatgcagatgtaaatggtctgggcaccacccttcaggaggagcttgccgccgctcagggctgatctatcccgcgatattccgcttagcagcagtttcttcctgttgctcctcttaaaccgaatgcctctttgcggtccgctggtcagagcgggccgtaagggggcattccccttccagcaatcaaacagacgggcgaacgccccacagaataaggaggtctctcttatgagcaagtttttttccctggcctatctgactctgcccaacacccacccggtggatcagatcgagatcgccgcccagtgcggctatgagggggtgggcctgcggaccatctcccagcacctgcccggagagccggactacgccctggccaacggccgaatgttccagatggtccgcgctgccctggagcgcaccggcgtgaggctgatggacatcgaactggcccgggtggcggacggggtggacgtaatgagctacgagaaggagttcgccctgggggccgagttgggggcgaaatacgctatcgccagcgtgtggagtgcggaccgggacttctcccgggtgcagttcgagaagatgtgcgatctggcggacaaatacggcatgaagctcaatctggagttcgtccccttctcaaacatccccggcctgaccgaagccctggcctggatggacctgatggaccggcccaatgtgcaggtgctggtggacactctgcacgcccaccgggtgaaggtcaccccagaacagctgcgggaggtagcggcggagcgattcggcttcgtccacctgtgcgacggtccggccttcatcccgccggtggaccacccggacatggtgggcgtggcccggggcgggcggctgtacgtgggagagggcggcatcgacctggcggggatgctgaagaacatccctgatcccccctactattccatcgagctgcccaacgcggcggaggtggcgatccggggcaagctggagcacaccaggcgctgcctggagaccgccaaaaccttcttcgcggcgcaccagatctgaagagaaaagaggcccgggatcttctgatcccgggcctctttttggcgtttggtcagtcctgacgagcggccaggcggcggctgcggaactcggcggccgcggtgaacagcacgtcggaggaggagttcagtgccgtctcgcaggagtcctggacgacgccgatgatgaagccgatgcccaccacctgcatggcgatgtcgttgggaatgccgaacaggctgcacgccatgggaatcagcagcagggagccccccgccacaccggaggagccgcaggcggcgatggaggctaccacgctgagcaggaaggcggtaggaaagtccaccgagatgcccagggtgttggcagcggccagggtgaggaccgagatggtgatggcggccccagccatgttgatggtggctcccaaggggatggagacggagtacttctcctcgtccaggcccagctccttgcacagccgcaggttgaccgggatattagcggcggagctgcgggtgaagaaggccatgatgccgctctccttcaggcagcggaacaccaggggataggggttgcgccggatgcacaggaagaccagaatggggttgacgatcaaggccacgaagaacatacagcccgccaggacgcagagcaggcggccgtagtccatgaaggaggagaagccggtctcagataccgtggtgaacaccagacccaggatgccgaagggggcgcagctgatgacccagcggatggcggtggagagggcgtcagacagatcgcccagcacctgcttggtgcggtcggaggcgtcccgcagggcgatgccgaagaccacagcccacagcagcaccccgatatagttggcctccgccatagcggagatggggttgctcaccgagttgttgagcagggtctggaggatctcgccgatgccgccgggggcgctggaggccgcctcctgggccagcgccagggtggagggaaacagaaagctggcaaccaccgcacacagcgcagccagaagggtgccgatgaggtagagcgcgatgacggtgctcatgttgctcttggcccctttcttgtgctgtgccagggagtgcaagaccaggaaaaagacaagcaggggggccagggccttcagcgcgcctacgaacagggtgcccaggaggctgaggaaggaggcgccgggcaggaggaagcccaggacagcgcccaggatcaggccgatcagaatacgtttgaccaggctgagctggttccatttgcaaagcagttccatgaagaggttcctttctggccaaaggccggggaatggagggtgttccgccggaagaggacatctgtccgtccggataaagaggccaaaaaaagacacgcttagaagcgtgtctttctttttggagcgagtgacggggctcgaacccgctacctccaccttggcaaggtggcgctctaccagatgagctacactcgcaacgacaaagcatattatagcagaaaatttgtcgctgtcaagcataaaatgaaaaaattgagaatgatctcattccgccccgtcggaggaggcggaggaggtgccgggaacctcctccgtcccctcctggctgtccgacggctccccgcagggggggaccgcctgggtatcccactggtagcccagggcggccatctcccggtcagagaggagggggtactgcccgcggctgtccgccccccgggtgaggtccagatggcgatagccgctctcggtgcggacgacgttccagaagtggggtgacccgtccagggtgcccggtaccaccatgccggtcagctccagccgttgggccaacagcagggcggccagggcaagtccctcgctgtctgctgcccccgccaccagggcgtcataagcgctgccccccccctccggatcgtagtgtccggcgtccagcacagcggcagatacggtctggatggcctcgtccccctcggtcccccagatggagaccacgatctcattggcgcgccgggccagggcggtccggcggcgctggagctctttctgctccaggtggtaggtaagcaggacctccacgatgcgctggcggccgctctcctccccttggggatagatatagacctgggcctcgggcagatccagggcggtgtctggactggcatagtaggcctcccggaagagggtttggatgtaggtctcgtccccctcgaagtagctgatgcgcagggcggcctcggtgccgaaggaggagagcaggtccttgagttgggagcggatggcggtggcaccggtggcggccacgatggcggagacctgctcccgggtgcggcggtaggtgatctccacagcggcctcatagtaggagacaataggggtcacatcatagcggatgaagtccactgaataggctcccagagggtcctcctggaccacctccagacaggcgttggacagggactgctccacatcctggtcgtagttgtacatccggacagtgccctcctcctcacccagggagatgaggtagatcagggcattgaccagctcctggtagttctccacccgaaggatggaggagtccccctcggcagggggcgtggcgctgtggggagtcacgctggtgtagctgcgggcgagcagtgaggagcacccggacagcagcagggacagcgcggccacggccgcgcagagcctccatttcatcagatccctcctcccatgttcccgccggggctcacatccccagcgcctctccgatcagtacgacttccatctcctctgtggcattgggacgagcccaaagaaccgcaagcccccggcagatgcgctctgggctcttgcagtcatagcaccggtctgccttggcggcgcagggggtcctgcaccccatggactgtgcccgcttgggggcggccacgttccgggcccgccacagtgccgcctcaaagtcgggggcgaccttgttgacacccaccaggaagtagaccttctggtggccgtacagggtggaggagacccggttgccgttgccatcgatgttgacgatctccccggtctccgccagcgcgttggcggaggtgatgtacacatcggtgaggacggcgtccctcagggcgcccccctcccagtgccagaccacctggttgtgggcagccagcctggggtagagccccatctccttcaccgtcatggacccgccgatgcccaccgtttttccatcgatctggccgtccagataggcggccgcctcatctgcggtggggaagtaggcggtgcggaagccgcgggcctccaggttggcgcggagtttttccagatctgccatggtgatacctctctgaaaaaatgaatggatcacaggtcatgctggtgatagctgtggaagccctgacccagcacctcgtgggcatcgcacacgatgagaaaggcggaggggtcggtctcctttaccgcccgcttcagggccacgatctgcttctgcttgaaggcgcacatgagcacgtcttttgcctccccggaccaggccccggccccccggaggatggtgacgccccggtccagctccgtactgatggagcggatgatctcctgggggcggtcgctgatgatataggccaccttggcgttgtccaggccgtagagcacccggtcgatgaccagggaggagatatacagggagaccagcccgtacagggcgctgctcaggctgtggaaggccagagcggccagggcgatgaccaccaggtccaccgccatgaccagggtgcccatgggcagatggccgaagcggagcttcagcagccgggcgatgagatcggtgccgccggtggtggctccctggaggaacaccatcccaagggacagcccgatcagcgcgccgccgaagacggaggccagcatggggtccatgggcgggaaggagtaacaggcggccagcaggtccacccccagggaggtggcggcggtggcgaagagggaggaggccagcagcttccaccccagcagccgccagcccagcaggaacaggggcaggttgagggcgatgaccgcactgcccaccgggatggcggggacgatggcatggatgatctgccccagaccggtcatcccgcccaaggtgatctggttgggaacatagcaccagtcaaagcccagggcaaagacagcggaggccagtgtgatccacagatagggccggaaggcggcccagagcttgccggtgcgcacaaaaaaacttcctttccttttctggttgggcggcgcggcggctgcccgggacggtggtgttacagcagggtcatctgctcctctccccggtcgggctcccgaaggagggctcccgcaatgggcagggagcgggcccggtagcgggcggcgttgcggataggggtctgagccaggggcagggccttctccacccggtatttaggcttgagggacatgacgttgaccccctgggtggtgcgggtagtcttgggggagagggcggaggtgtggaagatcatgcagcgcccctcggtggagtagaccgccatctcctggtcctcctccagcagaaaggcggagaccaggggggccttgtcggaataggccccggtgagctttttccggcgggtctgggtctggtaggcggacagttccacccgggccgccttgccgttgtcaaagaagaagagcagctggcggcggtagtccccggggatgcaggcccagaccacccgctcctcctggtccatggcaagcttggtgggcaggtagtcccccagcacgctggccttggtgtcctcaaattcgctgagccgggtcttatagcactgctgcctgtcggtaaagaccagcagctcgtcccggttggaggcctcccaggtaaggaaggggccgtcgccgtccttatacttctgctcgccggacatccgcagggactggggggtgattttcttcagatatccctcccgggacaggaagagattcaccgggtagtcggggacctcctcctcagcggtgagcagctcctcggtctggtggtcatagacgatatcggtgcggcgggggagggcgtactttttcttgacttgctccagctcaccgatgatgacctgacggatacggcgggggctgttcaccaggtcctggaggtcagcgatctcctcctccagggagtccacctcctgggtgcgcttgaggatgtactccttgttgatgttccgcaggcggatgtcggctacgaactcggcctggatctggtcaatgccaaagccgatcatcaggttgggcactacctccgcgtcctcctcggtctcccggatgatgcggatggcccggtcgatgtccagcaggatgcgcttgaggcccttgagcaggtgtagcttctcctgcttcttcttcagggagaagtatgtgcggcggcgcacgcagtcgctgcgccaggcggtccactcctccaggatctcccgcacccccatcacccggggcatcccggcgatgaggatgttgaagttgcaggactggctgtccatcaggggagtggacttgaacagcttggccatcagcttgtccgggtcagtgccccgcttcaggtcgatagtcagcttcaggccggacaggtcggtctcatcccgcatgtcggcgatctcacggatcttgcccgacttgatgagctcagccaccttgtccatgatggcctccacggtggtggagtaggggatctcgtagacctcgatgatgttgtccgccttgaggtagcgccacttggcgcgcaccttgaaggagccccgtccggtgcggtagatggaggccagctccgaggcgtcgtagagcagttcaccgccggtgggcaggtcgggggccttcagggtggacatgagatcgtggtccgggtccttcagataggcgatggtggtgtcgcacacctcccccaggttgaagccgcacaggttgctggccatgccaacggcgatgccctggttggcggagaccagcacgttgggaaaggtggtgggcaggagggtgggctccttcagcttgccgtcgtagttgtccacaaagtccacggtgtcctggtcgatgtcccgaaacagctcggcgcagatggggtccagccgcacctcggtgtatcggctggcggcccaggccatgtctcgggagtacacctttccaaagttgcctttggagtccacaagggggtggagcagggccccgtagccccgggagagacggaccaaggtgtcgtagatggcggcgtccccgtgagggttgagcttcatggtctggcctactacgttagcgctcttggtacgggccccgcccagcagtttcatctgatacatggtgtagagcagcttccggtgggagggcttgaagccgtcgatctccgggatggcccgggagacgatgaccgacatggcatagggcatatagttgatctccagcgtctcggtgatgggctgctccagcacctcggcccgcaggcccatgacgttggggttggttaccttgggtttggtctcgtcggggtttttcttctttggcatagggatatccgtcctatcttctgccccagcttagggggacattttcaatcaaacactgaaagagatcacgcatctgcccgatatagagggatcaggctggcaaaacaaatgctcaaagatccaaagatttgagtacataaaataagatcctggtcgaaccgcagaaaaaaccacagaagaaaacctgtggggcagagcgctccattgagcaaaaacagagctccgaggatttttttccagtgatcccatacggcggaggaaactttccgacttgtccaggcggaaggcattccgctggccgtcagaaaggatacaccgaataacagagagaaaatggtcatgcaggcgtacagagcggggagagagggaaaactgtgtgagaagacattcagaaaagcgatggatgccagtgtatagaaaaagagatgtgtgagccgtttcatatcacccctccttgggtgcgtacgccatcccaaagggcgttgcggccaggccgccctttcccgtctcccggagggaggggggcagggaacggcccacctctgccatggcgtccagaacctggtccggggggacccggctctcgatgccggccagagccatctgggccgccgaaagggcgtccatggccccgatgacgttgcgcttgacgcaggggacctccaccagcccgcccacaggatcgcacaccagccccagcagattcttcacagccatggcgcaggcgtgagccatcatggagggagtgccgccccggaggtggaccagggcgggggcggccatggcggcggcagagccgatctccgcctgacagccgccctcggccccggagatggaggcccgggcggcgatgaccattccgaagccggaggccacatacagggcctggaccagctgctccctggagagagagaagtgccgggcgcaggggaggagcaccgcgggcagcacgccgcaggcccccgccgtgggggcggccacgatgcgcttcatgcaggcgttgcactcccccattcgcagagccccggccatcacctgggagagaagggggccgcacagggggtccccggcggcgtacagggtcattttggccccgtcacccccggacaggccgctgtgggagcggtcctgggcctgatagctctcgtccgcctgcaccatggcgtccagcatggcccccatccgctccagagagcgggcgcggggcaggtcctgccgccggcagtcggattccagaatgttttcccagaggggcaggccggactgttccgtatcctggagcatctgggcgatggagtcaaaggcgatcaaaggggcacctcctgttcttccggggtgtagcgggtgacccgcaggataccgggcagggcccgcacgtcccgggcggcgtcctcggggatgggctggtcgcactcgatgaccatgacggcgctgccgccccggccgccccgattgagctggagggtggccacgttgaggccccgcccggccagcacgccggtgacctgactgacgcagccgggctgatcggtgttgtggaccaccagggtgggcagctccccgctgaaggaggtgtgcagtccatccacctgaaagacccggatgcgcccgcccccaggggaggaggcccccacctccagctgtccgcccccggcatcctcaagacggatgagggcgctgttggggtggacgtcccgcaggacgcaggtgccgaaggagaaggacagcccccgctcccgggccagacggaagctgtctgggacccggccgtcggccggggagaggcccagcagcccggccaccagggcctggtgggtgccgtggccctctccggtggaggcaaaggagccgtggagcagcagctgggcccggacgggctcctgccccagcagagcccgggccatgcggccgatgcgcaccgcccccgccgtgtgggagctggagggccccaccatgacgggacccaggatgtcgaacaggttcataggtgtgttcctccgctgcgatctcatgtgaagtaaagcaataaaagaaagagaaacatcaggcaggaaaggccgatcacaaagcgccccagccatctggccagccgacggcggtcctccggcgtgtcgtcggcaagtcgcctgccgtttttgaccagatagatgcctccgtccttaaaatagcagagggcctgaattgcagcgtcagtcctgtacaggatgatgcccagcaggagaaagaagatacacaggatggaaaatccaaacatcacaatggaatcgtctgacattgggcctctccctgccgctcgtgatgagatgattacgagatgtccgccagctccagatatttgtagccgttgtccgcgatgtggctcttgcgcccctggaggtcatcccccagcagcaggtcaaagacctgggcggtgcgctccacgtcctccggcatcaccttgatgagccggcgggtctcagggttcatagtggtcagccacatcatatcgggctcgttctcgcccaggcccttggagcgctgcacatcgcacttttttccctccagagaggcgacgatgtcgtttttttccttgtctgagtaggcaaaccaggtcttttccttacaggtgatctcgtacaggggggactccgcgatgtagacatagccctgctggatcagggtgggggttaggcggtagagcatggtgaggatcagggtgcggatctggaagccgtccacgtcggcatcggtgcagatgaccaccttgttccagcgcaggctgtccaggtcaaaggaggccaggtccttcacgtgcttgtcctggacctccactccgcagcccatgaccttgagcaggtcggtaatgatctcgtttttgaagatcttggcgtaatccgccttgaggcagttgaggatcttgccccggacgggcataatgccctggtactccgcatcccggctgagcttcaccgcccccatggcggagtctccctccacgatgtagagctcccggcgggacacgtccttggtgcggcagtccacgaacttctgcacccggttggagatgtccatggagccggacagcttctttttgatgttcaggcgggtcttttccgcggtctcccggctgcgcttgttgatgagcacctgctcgcagatcttgtctgcgtcgaaggggttctcgatgaaatagacctccagctgggcgcggaggaaatcggtcatagcctcctggacgaatttgttgttgatggcctttttagtctggttctcgtagctggtctgggtggagaagttgttggagaccagcaccaggcagtcctggatgtcgttgaagctgatcttgccctccgacttctggtacttgcccagctgcttgagccgggcgtcgatggcggagacgaaggcggatttcatggccttctccgggctgcccccgtgctccagccaggaggagttgtggtagtgctccacgatggacacccggttggagaagcagaaggagaccgacagcttcaccttgtactccggcttgtcctcccggtcccggcccttccgctcggtctgccaaaacacaggctgggtcaagggattttccccggccagttcagtgacatagtccaggatgccgttgtcatagcggaagtcggtggtctcgaacttcccaccggtctggttgcggaagcggaaggtgacgccggagttgaccacagcctggcgcttcatcacgtccaggtagtactccacggggatgtcgatgtcggtaaagacctccaggtcgggcttccagcggaaggtggagcccgtctttctgccccggtcagtgggctctttgtggagcccgccgatattctcccccttctcaaagtggagggtgtatttggagccgtcccggtagatggttgcgtcgaaatactcgctggcgtactgggtggcgcaggagcccaggccgttgaggcccagggaatactcatagttgtcgccgtccccgccgtacttgccgccggcgtacagctcacagaacaccagctcccagttgtagcgctgctccttttcgttccagtccaccggacagccccggccgaagtcctccacctggatggacttgtcctcgaaccgggtgacgatgatgagatcgccgtggccctcccgggcctcgtcgatggcgttggacatgatctcaaacacggcatgctcgcagccctccagcccgtcggagccgaagatgacgccggggcgcttgcggacccggtcggccccttttagggcggagatggattcgttgccgtagctgggtttcttctgagccatagtaataaagatccctcacagtacaatgcggcgcgggaccgcgcaaaataacaattataataataccccatttggacggagaaagtcaagaaaagggcggagcggcctgggacagaaaaaagaggctgggagacagacaaaaagggaaagaatgggtggggcgggaataaaaagaggggaaatgccccagactgaggaggaaaggggcgggatctgtggagaatttctgggtagccgaggagagcgagggcatcggggaggcggtgcgccggcagctgggggagcgggaccggcgcacggcagcgggaggatcaccctggctgctggtggtctccccccgggcagcggagcggaggaggcagctgcccactgggtgccggacggtgcttctgcccggcggagcgggggggctgctctccgggctggaccccgcggcggcggtaagctacggcaccgggcccagggacaccctgaccctgtccagccgggaggggcggcagctgtggtgcgccatccagcgggagctggtgacggtggagggacgggtggtggagcggcaggagctgcccctccgcctgccggatcacatgtctcccctgtctgtgctggcggcggcgggggccctgctgctgctgggggtgcccccggaggagctgggccgggaccgcggggcggtcaggggcggccagggatgaaagaccggcggccggaggtgtcccctccggccgccgcacccgtgttacggttttttcatggtcaggctgatgcgctttttcttctcgtccacctccagaacccacaccgtgaccacatctcccacggaaagcagctgggaggggtgcttcacccgctggggcagcttgctgatgtggaccagcccatcctgatggaccccgatgtccacaaatgccccgaagtcgatgacgttgcgcaccgtcccctggagctccatcccgggcttcaggtcccgggcctccatcacatcggtgcgcaggatgggggcgggcagctcgtcccgggggtcccggccgggcttcatcagctccttgatgatgtccgccagggtggggacgcccacgccgcacacccgggccagcgcctccaggcccatggcctccgccttctccttcagggcccccatggcccctgccctgacgtcggacagggtgtagccgcactgggccagcagcgcctccgcggcggcgtagctctccggatggacaccggtgttgtccagaacggaggcgctctccggcacccgcaggaagccggcgcactgctcaaaggccttggggcccagcttgggcaccttcaggacctgcctgcgggtggtgaaggccccgttctcctcccggtatttcaccaggtttttggcagtggcggcggtgaggccggacacccgctggagcagggagggggaggcggtgttcacatccacgcccaccgcgttgacgcagtcctccaccaccccgtccagggcctcgcccagccgggcctggggcatgtcgtgctggtactggcccacgccgatggccttagggtcgatcttcaccagctcagccagagggtcctggagccgccgggcgatggacacggcggagcgcaggttcacatcgtactcggggaactcctcggcggccagcttggaggcggagtagaccgaggccccggcctcgctgacgatcatatagctcaggccgccccccagtctgtggatcagctccaccgccatctgctcggtctcccggctggcggtgccgttgccgatggcgatgtgctccacgccgtgctttctcaccagatgggacagcttggcgatggcctcctgtttctgccgctccccataggtggggtagactaccgccgtgtccagcaccttgccggtgccgtccaccaccgccaccttgcagcccatgcggtagcccgggtccagccccatggtgacccgccccttcaccgggggctgcatcagcaggggcttcaggttcagggcgaagttgtggatggcaccctcgtccgcctgctcagtgaggtgggcgcggatctcccgctccatggagggctggatcaggcggtcataggcgtcgtccgccgccgcccggacaaagtccatgcaggccgcgccgggcaccacggcccggcgcaccgccacgtgggcggtctccgggtccagctccaccgtgaccttgagcaccccctcccgctcaccccggttgacggccagcacctggtggccctgggcccgtcccaccgggaccttgaagtcatagtacaggcggtagaccgtgtcctccggctccttggccgcagcccgggaggccagcatgccccggcgcagatacagctgccgcagctccctgcggatgtcggcgtcgtcggagatctcctcggccaggatgtcactggccccctggagggcgtcctccgccgtctccacccccttgtccgggtccagaaagtccagggccgcctgacgggggtccaccgccgggccctgagcggagagcagccggaccaggggttccagccccttctcccgggcgatggtggcccgggtgcgccgcttctgcttataggggcggtacaggtcctccacctccgccagagtggcggccgcagcgatggcgtcggagagctcctgggtgagcttgccctggttctcgatagcggcggcgacctcccccttccgggcctccaggttccgcaggtactgaaggcggtccgccagccggcgcagcagctggtcgtccatggagccgtggagctccttgcggtagcgggcgataaaagggatggtggcaccctcgtcgatgagggtcaccacattttgtacatgctccggagagcgttccagctcccgggcgagcgtttgaaggatggcgtccatgcaaaagtctccttggttcagaaatccctcccagtgtaaccgaattggaagaaaaagtccagggggaaagggtcaccaggtgatatggatctcccactggtcccactccccgtcccaggtgagagtgagaaaacagtcctccgcctgaacggcctccccttcccggagcccccagacgactgtgtagtcctggttctggtccagcatctggaagcggcccagagactggtccggcctgtggcggaggcagtagagaggatgggggcccgggtcatccgcgaagcggacgatgcccgtccgggcggtggaggagcactcgctgtgcatgccggtcctgatgtccagcatggagacgccgtcggagtgacagtggcggtagacggacaggggctccagatagccgcccctggtgtcccagatgtaggtctcgccgttgctgatgaagtagtcctggcacagggggcagaaggcaccgttgcagacgacgaagtacaggccggtgaccagaaggaaaagcgcagtcagccccaggaccataacgtcgaatttggtgggcttgaattttttcatccggattcctccctcaaagacaacagttttctgtaaagcacgccctcctgcagagcccggtgcccctgtcgggcggcgtgccgttttccccaaagccttccccctctggggggaaggtgtcacggcgcatgccgtgacggatgaggggtcttccttcccgtgtcccagccgtgggatggcgaaaggggttccgccctgcggggcgggtccctttcccagcgatgggaaaggaaccaaaggatcgccgggggacactcccggcgggaccacggctccacgtgcgttccgcctgggtcccacagtccgctttcccccggccccccaggcacgtgagccaccgagcggagttgtctgaaacctgaccggcgcggcaatgctttcgcactgaccagcgccttgcgccgctgccgctgatgccctgcgtcatttgggtccatgcgctgtgccagctttgcgcctagtgtttccggcctggcaggggttgcggccccctgttcgcgttgctgccgcgagtgcgttcaatgggagcggcccaacgataatcttgcacatttgctcaagatacatgatataagagggagggctgtccaggaagatattcacaatgcatatatatgcagtttgaatatctggtaaaaaatctcagtcaatttataatgatatgcagaggtttagcttatgaactctgcatatcaccgcctatacagaacattaggcatcaatattgcctattatcgaaatatgaaagatatgagtcaggaacagctcggagacaggttggagatcgaccagagccatgtcagcaaaatcgagagggcttccatcgggatatccatggatatgctgtgtgatattgcaaaggaactgggggtagaaccgtacctcctgctgaaaccgaaggattgaaaaggaaaataaagttgggaccgggccgtctgcatcaccagacggcccggtcctattgttttgtgccgcccctaaagccttcccccctcaggggggaaggtgtcacggcggatgccgtgacggatgaggggtcttcctactcccgtctctgttccagtcatgggacatgccagagaggttccgccctgcggggctggttcctttctgagcgtccagaaaggaaccaaagagacgccggggaacgctcccggcgggaccacggctccacgtgcgttccgcctggggcccgcagtccgctttcccccggccccccgatgcgagagacgcgggccttggacatggaaccggcgtccggcgcgggtgggggacgacacacagttcccccgtttgcgctgccgccgctggtgtgtccaatgggcatgcacaccccgcggtggtgtcgcgcctggattggcagaataggggcagcaggtgcgaaatcagcgggcgcgcaaaagctgaagatatctcctcgcaggggcggcttccagccgcccgaaaagccttcccccctcaggggggaaggtgtcacggcggatgccgtgacggatgaggggtctttctttccgcgtcccagtcacaggatagggaaagggggtacgccccgcggggcgtaccccctttcccctgcatctcccactgtccccgaggagaaaaccatggtataatgaaggacaagagacccctgaaacaaaaatagaacaggagggactgctgtgaggacattggaggatatcaacgccgagctggagcaggtgcggcagaagctggaccgggcccggaagctgtccgccgtgatggaggatctgaaggcccagcatgaggagcgcaagcgggcggcggaggacgccctgaaggtgctgtaccgggagcaggaggatgcggaggagctggagcggctctcctttgcctccttcctggccagaattcggggggagcaggcggaacggctggaccaagagcggagggaggcggtggcggccaaagcccgctatgacgcggcccgccgtgatctggaggatctggaggcccgctttcaggcggcccagaaggagcgggcgggtctggagggcctgagggggcgctggaaggccctgatggaggagaaggaggaactgctctgccaggcgggaggggagcgggcgaagcgcctgatccagatcggctgtgatctggacagcctgggcgcccagatccgggagctggatgaggccatatgtgcgggaaaagatgtgggctatgctctggaccagatgatcggccagctggactcggcggcaggctggggcacctgggacatcctggggggcggcatgctggccaccatggccaagcatggacgtatgaacgatgcgcaaaacgcggctttccaagcccgacaggccataagccgcttccgcaccgagctggccgacgtgtcccagctccgggtgcccgaccttcaggtgggggagttcacttcctttgcggactatttcttcgacggattgttcgtggacctgtacatccaggacaagatcgggacggcccggcgttccgcagaagagacggcggcccaggtggaggacctgctctcccagctgcgccgggagcgggaccggacagcggagcgggccgccgagctggagcgggagcgggagagactgctggccggcatgtgaggacagcggccaggaaaggagcatggatatggaacaggagcagaggaccctgcagaaatgggtcgatgagagcagacgcatcgtctttttcggcggggcgggcgtgagcacggagtcgggcatccccgacttccgcagcgtggacgggctgtatcaccagaagtatgactatcccccggaggagatcctcagccgcagcttttttgatgcccggccggaggaattttaccgcttttaccgggagaagatgctctgcctggacgcccagcccaacccggcccaccggaagctggcggagctggaggcggcggggaagctgaccagtgtggtgacccagaacatcgacggactgcaccagcgggcgggctcccggcgggtgtgggagctccacggaagcgtccaccgcaaccactgcatgaggtgcggcagggcctatcccgtggagttcgtgcgggacagcggaggtgtgccccgatgtgcctgcgggggcatcgtcaagcccgatgtggtgctctatgaggagcagctggacgggcataccctgcagggggctctttcggacatccagggggcggatatgctcatcatcggcggcacttcactggcggtgtaccccgccgccagcctggtgaattactaccgggggcaccgcctggtgctcatcaacaagtcccccaccccctacgacgcctacgccgacctggtgatcgccggccccatcggggagatcctgggcggcgtagcggtggtgtgagggcgcgggatgaaaaacggccgcctgtttgagctgctctatctgctggtggagcgccgcgccctcaccgccggagcagctggaggttccttccccggaacagcggcagaatgggaccctgaccctccgttttgccccctccgcggcctggcgggtgcgggactattttgctccgggccagatccgggcgggagaggacggctgcctgctggtggagtgtgactttcctcaggacgggtggctgctgggctttcttctctctttcggagaccaggtggaggtgctcgcccctgcctcttggcgggaggtcctgggccggactgggaaaaagatcgcggccctgtataaaactggacattccgtgtcaggtatccaggcgtatcctgagggcacagaggaggggagcacccctcccgaacaaaaggaggaacttgatatggaagagcggatcttttgccagtgctgcggcatgcccctggatgcccccgaggacatggggagcaacgccgacggaagccccaaccgggattactgccgctggtgctatcagaggggcgcattcaccgcgccggaggccacagtggaggacatgatcgcctttgacctgaaattcaatgaggagaacggacatcccttcggcccccaggaggaggcggagaggctcctgcgggcctggctccccaccttgaagcggtggcggaagtaggaaatggcaattggggcagggcctgcggctggccggcttttctccgtgcagggtgtcgggcgcatgatatgcgcccctgcgaaatagacggagccccacgcctcccccaagggggaaggcgtgggggcgtccttctgtggggccggatcaacaggatggacaggccccccctctctgagggaggtgtaaaaacagctgcttccggggcggccctgacggacggagccctccgcaaacaaaaaacggacggatcttgtaacagatccgccccttggccgttatacagacagaggggagggagcccgttggactttggacgcatctatgaggaatacttccgggagcttcagcggtacctcctgagcctgtgccgggacagccgaatagcggaggaactgacccaggagacctttttccgggccgtccgctccgccgggcagttccgggaggggagcgacctgcgggcctggctgtacaccattgcccggaacgtgttcctggaccaggcgcggcggaagcggaacaccgagatccagctgccccgggagctgccggacacggcgggagtcactttgacggaggcgctggaggaccgggaggaggccctgcggctccactgcctgctccacggcctggaggagccttacaaggaggtgttccatctgcgggtgttcggggaactgccctttggggacatcgcccgggtatttgggcggacggagagctgggcgcgggtgaccttttaccgggccaagcagaagatcatcgcgggattggaggaggagaagcatggcggatagacccatgggctgcggcgtgatccaggatctgctgcccctgtatgtggacggcgcggcgggggaggagtcccgggccctggtggaggagcatctcagatcctgccccgtctgccgccgggagctggagcagctgcgggggcgggtggtccttccgccggagacggacgggggggaggtccgggcctgggagaagggcatccgacgccggctggagcggcgggtgacggccgcagccgccggggtggcgctgctgctcattgccgccatgctggcggcctcccagttcgtccgcttcgggataccgggctggcagctggcggagcgggaccgaggagaggaggggcagccggtggtgctgtcagaggcgcggaacggggacatggcctttttcctctatcaggagggctccagcctgcgctacacctactatgaaaacgagcctgggctggacttcggctatcactttcgggccagcggcaccggccatgaggagaccggggtgtatgtggtgcagcacggggagacactgctggtggtttcgctgaaccgagtggaggaggtggaggggatcgaggtgaccgacccggagagcggcacggtccggcagacatatccggtggccccgggggagcccttcgcggtgctggtgactctgggagaaggggcggaggacttggccctccgggcagtggaccgcagaggggagaccgttccatttgagaactactacgtgcggtgaacgggaacgaaaccgcagaaaaagcaggggcaggacaatacaaaatgtattgtcctgcccctgctttacgatttggatagagactgggttctcaggtgcccagataggccttcttcacgtcctcgtttttcagcagatcccggccggagccggtaagggtgatgcggccggtctccagcacatagcccaggtccgcgatcttcagggccatgttggcgttctgctcgatgagcagcacggtgaccccctgcttgttgatctcctggatgatctcaaagatccccttgaccaccaggggggccagccccagggagggctcatccatcatgatgatcttcggtcgggacatgagggcccgggccacggccagcatctgctgctcaccgccggacagggtgcccgccgcctgccaggagcgctccttcagccggggaaacagatcgtacacccagttcaggtcgtcttccaggtcgtccttccgcagataggccccgatcttcagattctccaccaccgacaggtcgggaaacacccggcgtccctcggggaccagggtgacccccttggagacgatgcggtcgggggacagaccggtgatgtcctccccctggagatggatgcggccgtgggcgggctttaccagcccggcgatggtgcgcagggtggtggacttgcctgctccgttggcgccgatcagggtgacgatctgccgctcgggcacttcaaaggtgatgcccttcacggcctcgataccgccatagctcaccttcagttcatcaatcttcagcatcgtctgccacccccaaatatgcctcgatgacccgaggatcgttctggacctccgccggtgtgccctgggcgatctgcttgccgaagtccaggacgtaaatgcggtcggagatccgcatgaccaggtccatgtggtgctcgatcatcagaatggacaggtcgtactcatcccggatcttgtggatgaaatcggtgagctcctgggtctcctgggggttcatgccggcggccggctcgtccaggagcaggagcttgggggcagtggccagggcccgggcgatctccagatggcgctggaggccatagggcagggagccggccacctcgtccttcaggtgggccaggttctgctcctccagcagggacatggcctcctcccgcatccgcttctcctccgccctgttgaggcggaaggcggccgaaaacacgttctgcctggcacgcatgtgcttggcgatgagcacgttttcaaataccgtcagggccgagaacaggcggatgttctgaaaggtacgggcgatgcccttctgggtgattcggtccggggtgggggagaggacctgagaaaacataccctggttctccccctgatagagcttctgcattctgccttgggggtggttttccaccatgggctctcccagaaaggagatccgcccgttggtgggctcatacactccggtgatgcagttgaaggcggtggtcttgccggcgccgttggggccgatcagagccacgatctccccttggttcacctccagggacaggtcgttcaccgccaccacgccgccgaactgcatggtgacgtgctccagccggaggacattttccacttggctcatttcaccgccccctttccggacgccttgcggcgggcaaacagaatgtcagagaattccttgtcccccattatgccccggcggaagaagaggaccacgatcatgatgatgaccgagaagaccaccatacggaagccggtgcgcagcaggggaacggtgagggagccgctgatgatgaagaaagccagccagaccagcagggccagggccgccagggagaccagcagctccttccaaacctttttggtggtgcggcgctcccggcggatcagcaggagggccccgccgatgaccagggcggcgaagaccaggatgaagaggatgcgccgggtgtcggtaacggaggtgaaggtcatggggctgtccagaaagcgcagccaccactcggcgcaggccacatacaggaaggtggccaggcaggagccggagatggagccgatgccgccgatgaccacgatgagcaggatctcataggtcatggtggaggtgtacaccttggcctgggcgttgttgacgaacatggcaaacagggcgccccccactccggcgaagaaggaagagatgcagaaggagagcatcttgtgcttggccaggttgatgcccatggcttcggcggcgatctcgtcctcccggatggccttgaaagcccggccgtaggaggagttgatgagcatcacgatgacgataatgcagagaatcgcgatgaggaaggggaagaaggtggacaggcggaggaacaccttcccgctcccgtcggtgaggttgaagttgttgaaggaggggatctgagtgatcatattggcgccgttggtgacgggcccaagggcctgccactggaacaccgcccggatgatctctgcaaagcccagggtggcaatggccaggtagtcgctcttcagacgcagcacaggcaggccgatgagccaggcaaagagggcggccacgcatccgcccagcaggatggccagcagcacccccaggatcaggcccgcgggggtgtccaccccgccgaacaggtcaggcagggagaggggcaccgccgagcccccgtacaggtagtacaccgaatctttggcggagacggggacggtgaggatggcgtaggtataggcgcccagcagcatgaagcccgcctgccccagggagaacaggccggtgaagccgttgagcaggttcatggacacggccaccagggagtagaccgccccctttttcagtacagtgaacagctggctggtgggctgaaggacggcggggacgctgggcagcaggctgctcaggttctccagcaggaccaccagcaccagcaccacagcggcgaagatcagccccgccgcggcgccctttttgctttttctgtcttggatcatgtcgtcattccctccttacaccttgtcggtggccttttccccgaagaggccggtgggtttgaagaccaggatgatgatgagcagggcgaaggtaaaggcgtccacgaaggtggtggcgccgtcaaagggcatgatcttcacaaagttctcacagatgccgatgagaaaggccccgatcaccgctcctggaatggagccgatgccgccgaacaccgcggccacgaaggccttcaggccgggcatggcgcccgcagtggggacaatggcggggtaggtggtgaagtagagcatggagcccaccgcagccagggcggagccgatgacgaaggtgacggagatcaccgagttgatcttgatgcccatgagctggctggtctcgaaatccttggccacagcccgcatggccatgcccaccttggtatggttgatgagctgggtgagcaccagcaccagggcggccaccaggaagggggtgaggatgaccacccacttgatggaggtccccgccagggagatggtgtccgacaggaagggaatggaggggtaggtcatgggctggcctccggtgatgtaggtggccgagttctggagcaggtagctcaccccgatggccgagatcattacgctcatccggggagcggagcgcaggggcttataggctgcccgctcgatacagaagcccagggccaccgtcagcgccagaaccagcagcaggctaacggggatgacggcggcggggggcaggtaggcggagagaaagctgctgaggtagatgcccagcaggccggccaccatgaacacgtcgccgtgggcgaagttgatgaggcggaggatgccgtacaccatggtgtagccaatggcgatcagggcgtactgtccccccaccgagatgccgaagagcagggtggagacaaaaaattccataggggttcctcccatttgctgtttttcaggccgcagggcctggagaggcggcggaacggtctctgtgggacaggtctggactgtctcaaaaagaggcgggactgcctccttttgaggcggcccagtccggtacggcggggacctggaggcccccgccgtaccggaaagcggtatcagtcagagagcggcgctcactgaacggtctgctgggtctccagctcccaggcgccgtcgttggtggagtgcttgatgtaggcggtgtcacggacggcgtcgccgttttcgtcgtcaaaggcgatgtggccggaaacaccgtcatgctccacatcccacagcgcggccttgatggcggcggggtccacggagtcggcggccttgatggcctccagagccacatagtatgcgtcatagcccatggcggacaccgcggcgacggtgtcgtttccgccgttggcctccagagcgccggaggcggtgttgatgtactccttgatgcccgcgtcaaactcggggttgccgccctcctgatagaaggtggacacatacagctgcacgtcggtgcccttggcggcctccagcaccatgttgtcgtccagggtgtcggagcccaggaaggggatgtcgatgcccagagaggcggcctgggaaatgatctgggtggcgtaggcgatggagactggggtgaagatgacgtcggccccctcggccttggccttgttcagataggagttgaagtcggagttgttggtggggaaggcgtccttgatgactttgccgccggcggcggtgaaggcctgctcgaagaagttgatcaggccctggtcatactcattgcccgcctcgcccaacagataggcggtcttggcctggaacttctccatggcgaagttggccaggacggtgccctggaaggggtccaggaagcagatgcggaaatagtagtcattgccggcggtgaccatggggttggtgcaggtgacgccgatggcaggcagccccgcgttgccgaaggtggggccggcggcgatggacacgccggagccgtaggagcccagcaccagagaaacgccctcgctcaccagctgggtggcggccgtcagggccttgtcagtggaggagccgttgtcggcgtagaccagctggatctgatactcctggccgcccacagtgacggtgggggtctcagagttggcgtactgcatgcccagcatctccttcttgccgccggaggcggagtcgccggtggagggctcgaacacgccgatcttgaggacattgtccccggagacagccggggtggagacggcggcaccgctgccggcgggggcattgccgctgctggaaccggcgccggcacagccggccagcaggcccagcatcatagaggcggagagcacgcaggcaagaaactttttcatcttcgatactccttttttcagttggattcaagtgatttaccgcactgaaatgtctgtgcaacaaaaacacttgtgcgcggatataaaggaattataccttgccagacgaaaaaaagcaatacaaaatgcaaaatggatcagaaaaaattgcagaaaggggacaggcccagggaaacgcattaacgggagactgtcgggcggtgagaaatacggcccatccgcttgttctccggggaggggtgtgatacaataaaaaacgaggaaaggaaaagcggggcgcgggacccggatgccccataaaaagcagccggaccgccatactagaggcagcacagcgtgccgcccggggcggctcagggaggtcatttatgtctcagacactgtattttggagggcctatcgtcacgatggagcgggagctctatgtccaggcgctgctgacagagggggagcggatcctctacgccggcagtctgcacggcgcggaggaacgagcggaagggacggtgcgccgggtggacctgaaggggcgggccctgctccctgcctttgtggacgcccacagccacctgaccgcctatgccaacaccttcctccaggccggcctgggggagtgcgccagctgggaggagctggggcggcggctgtccgccttcgcggcaagagagagcctggccccgggagaatgggtccggggagagggctacgaccacaatgagctggcggaggggaggcatcccgcccgccagctgctggacgcggcctgtccgggccatccggtgatgatccagcaccgctcaggacacgtgggggtctttaacaccttggcactggagcggctgggggtaaatgaggagaccccgtgcccgccgggcgggaggatggagaggggccctgacgggaagctcaccggatatatggaggagaacgcattcctggagctccagaagcgggtgcccttgccagacacagaagacctgctggcggcttatgacaaggcccagaggagctatgcctcctacggcgtggccacagtacaggaggggatgatgccggaccagctcatccccctctaccgccagctgctggagcgggacctgctctggctggacgtggtgggctacgctgatgccgacggacaggcggcggaggcgttctccggccatatccgggcgtacagcggccatttcaagctgggggggtataagatatttctggacggctcgcctcagggacgcaccgcctggatgcgcaccccctatctgggaggcggaccccaggaccggggctacccggtcctcaccgaccggcaggtgtatgaccggatggccctggccctggaccaggggatgcagctgctggcacactgcaacggcgacgcggcggcagggcagtacttgtccgtgttggagcagctggagcgggaacgggaggcatatctggagcggccggtgatgatccatgcccagctgctggatctggaccagctggacaaggtgaaggagctgggggtggtgccctccttcttcgcggctcatgtgtaccactggggagacgtgcatgtgaaaaactttggggcggagcgggcggcccggatcagccccgccggggcggccctggagcgggacatccccttcaccttccaccaggacaccccggtgctcccgccggacatgctggagacggtgtggtgcggagtgaaccggctgacccgctccggcgcggtgctggggccggagcagaagatccccgtggtggaagccctggccgcagtgaccatccgggcggcctggcagtattttgaggagggggagaagggcagcctgcgggaggggaagcgggcggacctggtgctgctggagcgggacccgctcactgcggaccccatgagcctgcgggacatccccgtgctggccacctggaaggatggacggctgatctaccgccgggagggctgaagccctgggggcgcaaaataaagaaagaggtgcctgactattatgaaaaccatcttgcaggaacagcggcgcagcagcgtcatcgtggctttgatcaccatggtgctgggggcggtgctggtggtgtggcccgaccggtctgtgcggctgatgtgcaccctgctgggggcggccctgctgatctgcggccttgtgtatatcctgggctggctggtccgcaggcgggaggggggcatatcggccttcaccctgatccccggcgtggtgctctccggcctggggatctggctgatgaccagctccgactcggtgatcgccctggtgcagtatgtgttcggcgctgtggtcatcttccacggcgtgctggatgtccagagctcggtctccctgatgcgccagggagcggctcggtggtggctggacctggccctctccgccctgaccctggccctgggggcgctgatcctcatcaaccccttcggcaccttcgccgccctggtgaccctgatcggcctggtgctgatctacgacgggctcagcgacctgtggatcatccaccggctgagccggatggtgcgggacctggagcgggatctgaatggggacatcatcgagacaagggggcgggacttggatgaatgacctgcgggaggtggacctggagcggggcatgccccgggccgagcaggctatccgtcagatgctctttgagctgcgccgcagccccggcctggggtgctccggggtgaagcttatccacggctacggctcctccggcgcgggagggcgcatccgggtggaagccaggcggcgcctggatcggatgaaggcggggggagagatctggggctacatccccggagagtccttctccatctttgactccgacaccctggccgcctttcagcgctgtcccaccctgcggagggaccgggacctggagcggcacaacaacggcgtgaccttcgtcctgctgtaagggagcggcagagttctgccctggacagaaaaaatgaaggataaaaaatttttcttgcattttggggcgggaacccttataattcctttcaaaagagcggggcggagaaggatgggaggccccgcggggagagttccggagatcaatagagcgcggctgcctcggaccgcgctctttttttaccctgaccgggccggacgctcccagaaacaggaaaggaagggaaaccatgattgaaatcatcaccaagatcaactcggccgtcaacaacttcgtgtgggggccggtgatgctgctgctcctggtgggcacgggcgtctacctcaccgcccgcaccgggtgcatccaggccgcaaaatttgggtatatcatgcgcaatacggtgggctcactgtttcgcaggcgggagaagcgggacaaggatgccaagaacctcaccccctttcaggcagtgaccactgctctggccggcaccgtgggcactggcaacatcgccggtgtcaccggggctatcttcgccggagggccgggggcggtgttctggatgtggttcgcggctttctttgggatgttcaccaaatttgcggagatcgtactggccctgaagtaccggcaggttgacgagaacggggtccactacggcgggcccatgtattacatcgaaaagggcctgggcatgaagtggctggcggtgctgttttcactggtggcgggcttcgcctgcttcgggatcgggaacatctcccagagcagcgagatcgccggggcgatggaggggctgttcgggatgagcggcctgaccaccggcgtgctcctggcggtggtggtaggcattgtggtgctgggcggagtccagcgaatcggccgggtgacctcctacatggtgcccttcatggccatcttttacattggggcggggctggcggtgatcctgctgcggatcgaccaagtgccggcggccctggcctccatcttcaccagcgccttcagctttgaggcggtggggggcggcgtattcggctatgccattatggtggctatgcgccaaggatttgcccggggcgtattctccaacgaggcgggccttggctccgcccccatggcccatgcggcctccgagacccaggagccggtggagcaggggatgtggggcgtgtttgaggtgttcatcgacaccatcgtcatctgcacgctgacctccctggccgtcattctatccggtgtgctggacgtggggctggacagctacgccaccaacggcgcggcggcggtggccgccttcaatgccatcctgcccgggaccatcggcgggaccatcattcagatcagcctgcttttctttgccctgtccaccatcctgggctggagctactacggtgagcggtgctgggcctatctgtccaacaacaataaagcggtggtgtgggtctttaaggtggtctttgttctggtgtgcatcgtaggtgccaccggaaacggcaccctgatgtgggatatctccgacaccctgaacggcatgatggccatccctaacctcattggcctgctgctgctgtccaatgtgatcattcgcagcaccaacgactatttcaaaaagcactgacttccgggagagacctggtattttgaagcaccggccggatgctggaaaagcccgcggcccccgcctgccccagagcaggcgggggcttttgctgtggagctggcaccgcaggggcgccaggagccatccctgttttcggacggagtgcctttttccgcagaggggtgagccattcccctgcaaggggtacaggcggcaaaagaaaaccggcggatggacgcttgcgtctgtggggtggaaccgatataatatagaaagaaaaacggaggtccgcctgaggcggggaaaggaaggccagatcatgcaggagagagcactacaatttcatatccagtgcggtccgggggatgtggggggctactgtgtcctgccgggtgatccgggcagatgccgctccattgcccagcggctggagggggcggtccatgtgcgcaccaatcgggagtttgagacctggaccggctccctgctgggggagaaggtgagcgtggtctccaccggcatcggcggcccctccgccgccattgccatggaggagctggccaacctggggacccacacctttgtccgggtgggtacctgcggcggcatccgcctggatgtccgcagcggagacgtggtggtggccaccggcgcggtgcgaatggaggggaccagccgggagtacgcccccatcgagtaccccgctgtccctgatttccaggtggccggcgcgctggtgcaggcctgccaggcgctggggaagccctggcacgcgggggtggtccagtgcaaggactccttttacggacagcacgaccccgcccggatgccggtatctggggagctggaggcgaagtgggaggcatggaagcggctgggggtgctggcctcagagatggagtctgcggctctgttcaccgtggcagcggcccggggagtgcggtgcggctctgtgttccacgtgatctggaatcaggagcgggagcaggcggggctggaccagcaggagtcccacgacaccgcgctggccatcgacgtaggggtggaggcgctgaagctgctgatccgccaggacgcccagagccgggccggagaaggccgctagacagaagagggaggagccccatggagcaggagaagagacagaaggagattacccggcacggcctgatccgggtgggactgtggctcggcgggggctggctgctgctggtcctgtgcgcctggggcatcctcccagaccgggaggtgcccgggatcctctgggtagggctgggcttgctgaccgcggaactagccatcctgtgggggaagacgtggtgggagagccggggacgcggccaggcgatccccgccggagcgcactggtggcaggcagagaaggaggagctggcggccgccgctgtgatgctggcggtgtggtggggctttctggccctgtgcgccgcgggggtgctcccccacatggaaccggaccggtacagctggctcctggcgggagcggtgaccatcctcttcggggcggagctgctgctctggcagagagggaggcgggaccggtagccggtggcgcctgccaccggcgggccccggccgtcaggcggccggggcttttttccggctgaccgcttttagttggcaaacggggaaaagcgtggtataatggccctgaatttgaagcaggccgccccaaatgggacgcgccggggagggagcggaaaatggacctgacagagcgcaccattgaaagcaaaacgatgttccagggccggatcatcacggtcctgctggataccgccggcctgccggacggggggaccgcccagcgggaggtggtgctccacccagggggcgtggccgttttggcattggatgaggcggacaacgtggcgctggtgcggcagtaccgctatccgctccacggtctgctgctggagctgcccgccggcaagctggacccgggggaggaccaccgccccgccgcccttcgggagctgagcgaggagaccggcctggaggcgggggaactgacctatctgggccatatctatgcctcacctggattctgcgacgaggcgctgcacatgtatctggcgcgggacctgacccgcgcccggcagcacttggacgaggacgagtttctggatgtggtgaccatgccctttgacacattggtggagcaggtcatgtccggggagatcacagacgcgaagacagtggccaccgtgctgaaggtcaagactctgctgggccgctgatatggacgacaaggagggatttctgtgggaaagagcatcctgatcgtagaggatgagcagaacatcgtggatattttgtccttcaacctgagccgggaggggtatgacaccctggaggcctacgacggccccactgggctccaactggcgctggagcaggacccggacctgatcctgctggacctgatgctgcccgggatggacggctttgaggtgtgccgccaggtgcgggagagcggctcctcaacccctattatcatgctcaccgcccgggaggaggagaccgacaaggtcctgggcctggagctgggggcggacgactacatcacaaagccattctccatgcgggagctgctggcccgggtgaaagccaatatccgccgtatgagcatggtgcccgctgggaagggggcggcagcctccgccaaccggatggagctgggccgggtgacagtggacacggaccagatggcggtgctcaaggacgggcagccccttcagctgtctcagcgggagtacgatctgatccgtttcctggcggcccagccgggcaaggtgttttcacgggaggccctgatggagcatgtgtgggactatgaaggctatgtgggcgatgtgcgggcggtggacgtggccgtccgccgcctgagagagaagatcgaggacgaccccgccagtcctaaattcgtggtgacaaagcgggggatggggtactacttcggcggctgagccggaggggccgagggcggggacgtcctcggggacccgccgcaggggggacgccggtggtccggcgcggacccggagcgggagcggagggtcctctccgggacgatccattcgtcctggagatcagaaaaaagaaaagggctcccgcaggacgagtcctgcgggaaactgaccccgccagtcctaaattcgtagtgacaaagcgggggatggggcactgcttcggcggctgagccggagaccgcccagggtgccgcagaggccatttcccagggcgccgaggtgtggtgcctgtgaccggcaggcggatggaacagagcccgcccccctgagacagagggacggagagagaagagaggaggtgccccgatgctgcgcagcctgcacatgaagctggtgatgctgatggtgctgctcatcctgtcgctgatgacggtggtgggggctttcctcatcaactctgtggtggccttttacatccaggacttttacagccagatgagcacagtgttcggagaccaggagatcgtctccgacctgcgcaccgctgcggatggggagaccgacggggcaggggcgctgaagacggtgctgaatgcctatgccggccagctgggcgtggatacccgcaaccgcaatttctacatcctggacggggaggggacctcagtgctggccagctccaacggtgagagcggcgcctccggcttgtcctacaccgggaacctgatgacggctatcgagtccggccaggtgggagacgagagcaacgcggccgccgattacatggatgtggccatccccatccagcggggcggcagcgactatatcatctatatcctggacaacaaggccaccgtgtccaacctgaacaaccagctcttcctgctgatcatggaggcgctgctgttcggtctggtgatctcagtgctgctgtccttcctcctctccaagaccatgatcactcccatccagcggctgacggagggagccatgcgggtggcagagggggacttcgcccataagatcgaggtggcctcccgggacgagatcggcgtgctcaccgacaccttcaacgatatggcgggtcagctccaggacaccatccgccaggtggagaacgagcgcaacaagctcaacaccctctttctccacatgacggacggcgtggtggccttctcccggactggagaggtcatccacttcaatccctccgcggaggagatgctccaccggcccatcgggacggacaccaccttcggggagctgttcggcggcctggtctctctggagcgggtgctggcggtgcccgactacctccaggaggagcagacggttgaggagcgattcctccagctgctgatggctcccttcgaccgggaccggcaggggggcgtactggtggtcatccacgacgtcaccgagcagcggaagaacgaggagatgcgccgggagttcgtggccaacgtgtcccacgagctgcgcacccccctcaccaacatccgcagctatgccgaaacgctggtggacagcgccggagacctgcccccagccatggagaagaagttcctgggagtcatcctcaacgagagcgaccgcatgacccacatcgtgcaggacctgctcaccctgtcccggttcgactcggggcgcaccgatttgaagctgacccagttctccttttctgcggtgctccatgacctgtataacgcggtctatatggaggcccagcgccacagccatgcccttgagctgaagatcgagccggagctgcccgagatcgtggccgaccgggagcgagtggtccaagtgatgatgaacatcgtgtccaactccatcaagtacacgccggacggagggcgcatcgtcatctccgccggacggcggggggaccgggtgtggatgttggtggatgacaacggcatcggcatcccgccggaggaccggccccgcatcttcgagcggttttatcgggtggacaaggcccggtcccgccagtcgggcgggaccggactgggcctgtccatcgccaaggagatcatcgaccggcaccagggcgtgctggagctggccgacaaggagggcccgggactggcggtgcggatggagctgaagatagaggggccggaccatgaatagaaagagcaagcacgcccgcctgctggagctgggcaaggacgtgctgatcgtcctgctggcctgctcagcggtgtggctgactaccagggtccagcgcaccgggagcttgggagatctgctggcggacacgccccaggaggggcagggccagacccaggcccccggccagatggagatggtccgcccggtacggatggcggcagtgggcaggagcggagagaccaccatccgctatggggcacagtatgaccagcagagcaccgacgccctattccagcaggtggccaatctgctggtggaggcgctgagcgacgggggagagatgagccccgtcagccagtgggagtggcgcaccgccctgacctccccgcccagcctgtacttcgacctgatggagggggtccccctgtcggtgctgacgggctggctcaccggggagagcacagggggggaggtgttcgtgcgccggctggcactggccgcctcccggggacaggtgttcctctactaccaggatgaggagagcgggcagttttacgccggcccggtggacgtgatcagcgtcagccggctggagtccgctgtctccggcctgtcggacaacggcgcctgttttgcctttgagaaggaggggtacagcctcctgtctccctacaccctgctgatgccgggcacaccccagccggcggtctatcaggtctacaaccccctcagccgggaggagggcctcaacagcctgctggaggcactggacttcccggccagcagcagctacacctatcaggggaccgacggagagttggtggtgcgcaacgggtatgacaccctgcgggtatctgcccagggcacggtgcgctaccatactacggagggggagatatcccgttatccggtggcctcggacaccggcggaacggggtgctatgaagcggtagaggcctgccgggtgctggtctccgagacactgggcacccagtgcggggccgcccggctggtgctcacccatgtggagcggatcacggggggctgggcggtggagttcggctactgtctggacggcgcggcagtccaggtgtacgaggagggatgcgcggcccggttcctggtgcagaacggacagatcgcggagatcaccctccaggccagaagctatgaggagacggcggagagcgggctggtgctgccccggctccaggccatggccgccatggaggcggcggggctggagggccgggagctgctgctgggatatcaggacagcggcggcggaacggtcaccgccggctggatcgcccggtgagagagaccggaggggagggagagccgtggcctggcccaagatcaaaaatatcatcatcctgatgctgctggtgaccaacctgtgcctgctggcctttgtgggctggcgggagatccgggactggcagctccaggacaaggcgctggagcaggccgtctccttcctggcggagcggggcatccaggtggacgagcgcatcgtgcccaggtctgcggagctgccgcccatgggcatggaacgggacctggaggaagagcagaccctggcagcagcgctgctgggggatggcctgacccgggaggaacgcagcggcgaggtctatgtctatgagggggagcgggggctgctccagtgccacagcagcggggagttctgggccgactttcagagcggcgccttcccggtcccagagggggcggagatggcggagcatgctctggagaccatggagctgctccacttccagggggaggtggtgagcagcgcgggcaacgcccaggacgggagcgtcaccctgcggcagctgtggaacggcgtgccggtgctgccctgtcgggcgaccttggtctacgaggggggcgagctgaagcggatcgaggagggccggcgtctcaccgggacgccccagaccacagcaggtacgcccatcacggcgacgacggcgctgatgcgcttttatgcgggcctgagcgagcggatggacatctgcagtgaggtccgggagatcgagattgcctataccctctccaacgccctggggggtcccatctcgctgatcccggtctggcacatcaccaccgacaccgagatatatgagctgaacaccttggacgggagcctggctgcggcaggcgccgaagagacagagcggacggagcagtagaacgagaccactgacatgcccggccggaagggccggagcgggacaacaaagaaagaaggagatcatcatgttcagcaaagaaagccccattgggatcatcgattcggggataggcggcttcagcgtggcccggaaggtgcagaagctgctcccgcgggagaatctggtctatctgggggacggggccaacacgccctatggcaaccacaccgcggaggagatcctcactatgacccgctacatgctgcgcttcatggaagaaaagggggtcaaggccctgctggtggcctgcaacaccatttcctgcctcattgatcagtaccgggatgagatgagctgcccggtgctcagcgtagtccaggcgggtgcggacgcggtaaaggacttggatgtccataaggtaggagtcatctccacctgcttcactgcctccactcactgctacccggatctgatcggcaaggcagcgccggacaaggtggtcatcagccatggctgccctgacctggccaacgtggtggagcgaaacgtgggcaggccggagggacaggcgctgatcgatgcagatgtacagaagaacctggagggactggtccgggacgagcagatcgaatgctgtgtgctgggctgcacccactatcccttggtggaggaaaatatccacaggctcttcccgggcctgcggctgctggacccggcggagcagatggccaaggacgtgttggcctatctggagcgggacggcttggtgaacgacggccctcagcccggacggctggacatcttcaccaccggcagcgcggaggagtacgccatgaaggcggagaaggtgggactggacccggtgacctcggtgcagttctatccccccatgaaactgtaaaaatagtccggcggagccggcgtcagaaaaaaggctcaagggccgccccaccggggcggcccttgagtttaaaaaatctgcttacagcttcatgatccagccgtggggatcgggaacgcggccccactgaatgccggtgagggtgtcgtacagcttctgggtgacagggccgatctcattgtggttgatgatggccttctcgtccccctcggccagctcgccgatgggggagaccacagcagcggtgccggtgccccaggcctcctccagggttccgtccttggcggcctggaagagctcctcggcggagatgcggcgctcctccacctcatagccccagtccttcagcagctggatgcaggagcggcgggtgatgccgtccagcacggaaccgttcaggtcgggggtgaggatcttgccgttcaccttgaacatgacgttcatagcgcctacttcctcaatatatttgcggtggacgccgtccagccacaggacctgggtgtaacccttctgctcggcgcggttgcccgcccgcagggaggcggcgtagttgccgccggtcttggccatgccggtgccgccccgaacggcgcggacgtcctggtcctcgatatagatcttggtgggggccagtccctcggggtagtaggcgcccacagggcagacgatgacgatatactggcagtggtgggaggtgtggacgcccagggtggggtccagaccaatgacaaagggacggatatacagggaggtgtccttctcataggggacccactcctgatccagcttgaccagctcagtgataccggccagggccaggtcttcaggcacctcgggcagggcaatgcgctcgcaggacaggttcagccgacgcacgttgtccatggggcggaacagctggatggagccgtctgcggtgcggtaggctttcagaccctcgaagatctcctgggcgtaatggaggaccttggcggctgggtcgatctggaggggggcataggggacgatgcgggcgtcatgccagccctgaccctcgtcatagtccaccacaaacatgtggtcggtcatatacttgccgaagaccagcttggaggagtcaggcttctccttccgctgctcggcgcgggtgatcttgatctcttgcatcttggtttcctcctaaagtaaactcaaatcgagcggtcctggtttggaggacggcttttctggtatttccatattatatcagccttttttttcagacgcaacgggtaatcgtgggaaaagtggggccggcccaactttttagggaaagaattccgccatttccccagagaatggccccgcctggacggtttgctattgtttttcccctgggggtttgatataatatcaccaatcaccgcgctgatacggcggcacggcgcgggaatggggcgtgaagaaggtcctgctgacgggcggacctttttgttgtgataggaggtcccgcccccgggagggggaggaacggccgccccgaagaggaggaacggatcttgaaccgaaaaatgacgcagatgcttcagccaagctttcagctctatttcgtctgtctgatcctgtttgccgcggcatccgcctttttcagcctgtatctggcggcggcggaggccgtggtggtggtcctgctggggctgtattaccgggagaacagccgccggcggcggcgggagatagccaagtacatcgagaacgtcaccgggaacatggatgtggccaccaaggacaccatggtaaactcccccctgcccatggtgatcttccggccggagagcgacgacatcatctggaccaatgaccgttttctccatctggcaggggggaaggagcacctgttcgacgccaagctgagcagcgtgatcccggattttgatacccgctggctcatggaggggaaaaacgagtgccccaccgaggtcaccttcggtccccgccgctttctggtgtacggacacctggtccgggcctcgggccgggaggggggcttcctggccaccacctactgggtggacgtgaccgagttctgccaggtgcgggaccagttccgggggagccgcccggtgatggcggtgctgctgctggacaactatgaggacctgatgaagaaccagacggagaaccagcgatccaccatctacgccgaggtcaacgcccggctggatgcctgggtggcgggcaccgggggcatgctccgcagaatggagcgggaccgttacctgctcctgttcgaggagcagtacctgtcccggttcgtggaccagaagttcgacatcctggacaccatccaccaggtggtcaattccagcggcctggcggcgaccctgtccatcggcatcggcaaggacggcggcagcttccaggagctgatgcagtacgctaacctgtccattgagatggccctctcccgggggggagaccaggcggtcatccgcaacaagttcacctttgagttttatggaggccactccaccgagacggagaagcgcacaaaggtgaagagccgggtgatggcaaacgccctgtccgccctggtgtccgactcctccaaactgttcatcatgggccacaagatgcccgacatggacgccaccggcgccgcggtgggcgtgtgcgccatcgcccggaaaaaaggagtccccgcctacatcatccgggagggggggaccaatccctccaagcccatcctggataagctggaccagctgcccgagtaccgggggaatttcctcagtgcccaggaggccctggtggcggcggacagccgctccctggtggtggtggtggacaccaaccgcccggagcaggtccaagcccaggagctgctggagtcctgcaaccgggtggcggtcatcgaccaccaccggcgggcggccacctatatcgagggagcggcgctgaactaccacgagccctacgcctcctccgcctgtgagctggtcaccgagctgctccagtacatcgcagagcccaccgacctgctccgcacagaggcggaggccctgctggcgggcatcgtgctggataccaaaaacttcaccatgcgcaccggcggccgcacctttgaggcggcagctttcctgcgccgctccggcgccgacaccggggaggtgaagcggctgttccagaacgacctgtccggcaccatcgccaaatacgatatcatccagaatgcgaagctgtaccgggaccacatcgccattgccgtggtggaccacacggtgggccgggtgacagcggcccaggcggcggacgagctgctgaacatcgtggggatcagcacctcctttgtgctctttcccgacggggagcagatcatcatctcaggccgctccatgggagacaccaacgtccaggtcatcctggagcagctggggggcggaggcaacgccgccgccgccggcggacaggtggcgggcaagacgctggaacaggtggccgtggagctgacacaggccatcgaccgctatctggaggaggactcctgagggagccgctcattcccaaataagatatttcctaaaattattactgatagtatttggaggaacacaacatgaaagtgattttacagcaggatgtcaagggccagggcaagaagggccagatggtggaggtctccgacggatacgcccgcaacttccttctgccccggaagctggccgtctctgccacggcggacaatatcaacaccatgaagcagcaggagaaggcacgcaaggcccaggaggccgccgagaaggcgcaggccgaggccaccgccaagcagttggagggactgatggtgaagatcaccgccaaggccggcgagggcgggcgcctcttcggcgctgtgacggccaaggagatctccgaggccctggccgagcagcaccaggtggagatcgccaagaccaagctggttctggacgaacccatcaaggcctgcggcggctatcagatccgcgccaagctgggctatgaggtggtcggcacggtaaacgtcatggtggcggaggcctgagaaggacggtgaggggtgaggagaggggcgctgtgcagagcgttgatgcgcggccctcccaccgtccggcggttccgggcaccaaaatcccgaactctcgattttgaattcctgatttggaaggcaggtggtctcatatggtgctggaagaggaagagctgctccttaagcagctcccccattctgtggaggcggagcaggccgtgctgggctccatgctcatcgacccccgctgtgtcccggatgtgatcgagcagctccggccggaggacttctatatccggcagaaccgggagatctacgagaccatttactccatgttcaacttctccctcaccatcgacccggtgacggtgctggagaacatgcggaaaaacggggtctacgacgagaatgtctcccgcaactacatcctccagctgatggacaccacgcccactgcggccaacgtgggggagtacgtggccatcatcaaggacaagaccctgctgcggcgcatcgccgagacggcgggggacatgaccgctatggtccagcagggcacagacagcggccaggacgtgctggaggcggcggagcagcgggtctacgccatccggcaggggcgggccgcccggggactgacacccatctccgcggtgctgctggatgtgtatgaccggctcaatgagctggccgccagcgatgcggcggtgcccggcctgtccaccggactgggggacctggatctggccatctccggcctgaacaagtccgacctgatcctgctggccgcccggcccggcatgggaaagacctccatggcgctgaacatcctgctccacgcgggcaagttctccgggaagagcgtggcctttttctccctggagatgagccgggagcagctggtgctgcgcctgatctccaacgaatcctttgtggacaacaaaaagctggtgaccggaaagctcaatgagagcgactgggagaaagtggccgccgccgccgacgccctgaaccgcactaagatcctcatcgacgacgactctacggtgtcggtggccgatatcaacgccaaatgccgccgggtggaggacctggggctggtggtcatcgactacctccagctgatgacctccgccggcggaaaggagcgcagcggcgacaaccggcagcagatcgtctccgacatctctcgggccctgaagatcatggccaaggaactgaacgtgccggtgctgtgcctgtctcagctctcccgtgccaacgagagccggaccaataagcggcccatgctctcagatctgcgggaatcgggggccatcgagcaggacgccgatatcgtcatgttcctctaccgggaggactactacgagaaagaatcagaaaaccacaacctggccgagtgcatcatcgccaaaaaccggcacggggagacccggacggtggagctccagtggctgcctgagtacaccaccttctcctccatcgaccggacccatgaggagtattgaccatggcccattccagcccgttccatgggctgaacgccctcatcgagacctacggaatgatcccgccggggagcacggtgctgtgcgcctgctctgggggggcggactcggtgtatctcctgcaccggctgtacctgctccgggagcggatggggttccgtctggctgccgcccactacaaccatcagctgcggggggaggaatcccggcgggacgaagcattcgtccgccgcttcgtcgcccagtggtgcggccccgcccaggtggacggacatgagctgcccggtgtccccctctatgtgggccggggcgacgtggctgcccaggccggagagctgggacgaggcctggaggagaccgcccgggagatgcgttacgccttcctccgggagaccgcggcagagctgggcggagccctgatcgccaccgcccacaccgcggatgacaatggagagaccatcctgctccacctgctccggggcagcggcctgcgggggctgaccggcatccgcccggtgggggaggggctgatccgccccatgctcaccaccacacgggcccaggtggaggaatatctgcgcctctacggactgccccatgtggaggacagctccaacagggacgagtccttttcccgcaaccgcctgcgctggcaggtggtgccggagctggaggacatgtgccccggcttcgccagacggacggcggagaccgcagccctgctgcggacagacgaggactacctcaccggcctggcggaaaaggcggtggcggacctcctcccccgcgcggggaccctccgcctgcccgcggcagcggtgggggatctgcctgacgccttggcgccccgggcggcccggctgctgctggcccgcctgcgggacggagataccgatctggccgccccccatctggggggggtggtggccctgtgccgggggagggacccctctgcccggctggatctgccggagggcatcaccgcccgacgggagtatgagatgctggtgctcacccgggagactgcgcccccggcactggaggaggcatccctccccatgcccgggcagctgcggacgggggagtggaccctgacctgcgcggcagcggtgtaccaaggggagccccagtcgggccgggaattctggctggctggggcagaggggctcaccgtccgtccccggaggaccggggaccggctggagcgtccgggccgtccgggccgaaccgtgaaaaaaatcatgatcgaccagaagctgcccaggcacctgcgggataccgtccctgtgctggacagcggcggcagggtggctgcggtggcggagctggggccggacgcggcctttctgccccgcctgggggagccctgctggcatattacggcgaaaagaaaaggagaatatttcatgttggaaaaggatatccaggaaatactgttttcagaggaacagctggcccagcgggtgaaggagatcgccggtgagatcaaccgggactacgtcggacaggagatcatgctggtcagcgtgctccgaggttcctttgtgttcatggcggacctgtgccggcgcatcgatctgccctgtacggtggacttcatggcggtgtcctcctatggcggcgggacctcctccagcggccaggtgcagatcaccaaggacctgtccagcgacatcacggggaagaacatcatcgtggtggaggatatcctggacagcggaaacaccctgagctatctgctgaaggtgctagagcagcgcagcccggcctccatccggctgtgtaccctgctggacaagccggagcgccgggtcaagccagtggaggtccactactccggcttcaccattccagacgcctttgtggtgggctatgggctggattacgcagagcattaccggaacctgccctacatcggcatcctgaagccggaggtctacggcggctgagccggagagacttggagggcggcggcctcctgaaatttgtgatccgccggaaaggacgtggttttcctgaaacggttcagcgcgcgggacctgatcttctatctgctggccatcctggtgatggtgttcaccttcaatgcggtgcagcagatgaacgagccggatgaccccacttataatgagatccgcctgctctttgagcaggagaaggtgaagtacttctccgtggaggacaatgtgctcactctgactctgcggggggagggggaggacacctccaccctgaagtaccacctggccgacttcaatgtgttctataacgacctgcacgagcttatcgacagccagcgccaggctgggatcatccaggactatgactaccccgccggctgggcggagccttggtggttcgtctatgtgccctacctggtgatcctgctgggcttcggcatcctgatgtacaccatgtatctgcggcagaacactgggggcggcggaggaggggggccgtcccgcttcggccatgcccgcacccgcaccctggcagaccaggggaagaaggtcaccttcaacgatgtggccggtgcggatgaggagaaggaggagttggaagagatcgtggagttcctccgggacccccagaagttcaccgccctgggcgcccgcatccccaagggcgtgctgctggtggggcctccgggcacgggcaagaccctcatcgccaaggcggtggccggcgaggcgggggtccacttcctgtccatctcgggctctgacttcgtggagctgtatgtgggtgtgggtgccagccgggtgcgggacctgttcgaccaggccaagaaggacgcccccgccatcgtgttcatcgacgagatcgacgcggtgggccggcagcggggcgccggcctgggcggcggccacgacgagcgggaacagaccctgaaccagctgctggtggagatggacggctttggctccaatgagggggtcatcgtcatggcggccaccaaccggccggacatcctggaccccgccctgctgcggcctggccggttcgaccgccagatctatgtgggactgcccgacatcaagggccgggaggagatcctgaaggtccacgcccggaagaagcccctggcggaggacgtatccctctccgatgtggcgaaggccacctccggcttcaccggtgcggatctggagaacctgctcaatgaggcggctctgctctctgcccgggaggaccggcgtttcattacccgccaggacctccacgaggccatgatgaaagtaattgccggcccggagaagcgcagccgggtggtgacgccccatgccaggcggcttaccgcctaccacgaggcgggccacgccgtggtgatccacgagctggacagccaggaccccgtgcaccagattaccatcgtgccccggggacaggcgggaggcatgaccatctctctgcccagggaggaccgggcctatctgtccaagcgggagctggaggagcgcattgctgtctgcctgggcggccgggtggcggagcagctggtgctcaacgacatctccaccggtgcctccagcgacatccagaaggcgtctcagactgcccgggctatggtcaccaagtacggcatgagcgagcggctggggaccatcgcctacggcaacgagaacgatgaagtgttcatcggccgcaccatggcccaggcccggacctactccgaggaggtggcaggccagatcgacgaggaggtcaaggcgatcgtggaccgggcctatgcccggtgtgaagagatcctgacccggcggcggcaggagctggagctcaccgcacgctatctgctggtccatgagaccatgagcggcgagatctttcaaaaagtgttcactgacccggcggcccctgagctggcgcttccggaggaggaccagccggcccaggagggctgagcgcggcggcagccgggaggtggaaggacctcccggctgtttcatatggatagggagagggggacggaggatgagaaaaagaagagctggagggacggcggcgctggtcctgctgccgctgctggccggatgcggcgcctcagggccggaagcggcgggctccgggctggaggaggtgtcctcccgataggggccagacgcacagggggcgtgcctgctgggcacgccccctgtgcgttatgtcatgttacagctgacgcagctcctgaatggtctcctggatggtcctctggggcagccagacggcagccatctccgccagctgagccagggtcagggaccgggaggcccccaccagcgggtggttcatgaatttcccaaaccggcgctggaacacagaccgggaggcccggttatccagcagctcccccaccgtaatggtgttgtttctcagatccaaggtcatttcacctccgctccattctatgcaggggaggggaaaagaatgtggagtcaggacggtgagactgttgaaaaagtagctctgccgctttttcgagcaggagcttagaaaagtttacccacaattctttgcagaattgtgggtaaagatttcatgaaaagcatcatttctaaggcacatgccctgagaaatgacgcaatcaaaccttactcggctgcctgcgggcgctggaactccgagcaggagtttttttccacaagctgagtgggagcttccttatacaagaagctcccactggtgaggtttaaaattgtggtgtgctcaactctccgcataccgggagaggaactgccgggtgcgctcctgagaggggtgctcgatgacctgatgggctgggccctgctccacaatgacgccgccatccatgaagatgacctgatcggccacatcccgggcgaaggccatctcgtgggtgacgatgatcatggtggtcttctgctccgccagggagcggatgaccttgagcacctcaccggtgagctccgggtccagggcggaggtgggctcatcaaagcaaaggatgtccgggtggagggccagggcccgggcgatggccacccgctgctgctggccgccggagagctgactggggtagtggtccgcgcggtcactcagacccatcttggccagcagctcccggccctcggcctggatctcctccaggatctgcttccggttggctttgaagtcgggccgttcctggctgaggagctccttggccagggtgacgttccgcagggcggtgtactgggggaacaggttgaaggactggaacaccaggccgaaatggagccgctttttccgcacctcgctctcccgctgggtggcgggatcgtcggcgtcgaacagagtgtccccctggacgacgatctgcccctggtcgggggtctccagaaagttcaggcaccgcagcagggtggtcttgccgctgccggaggagccgatgatggccagagcctggccctgctccaggtcaaagctgatgtcctccagcacccgggtcgcgccaaagtgcttttcaatatgatgtacttctaagatcggcatgttcgctcccccttatacccggaagtagtccagcttcttttccagccggcccagcaccatggtcacgatggcgctgaaggccaggtagtagaccgccgtgaacatcagcggccaccacaggccggagatcccctgattgcccttcatgaaggactcagccgcccagatgacctcctgcagcgcaatggcacgggccagggaggtgtccttgaccaaggtgatgatctcgttggacatggggggcacgatgcgcttgaccatctggagcagggtgaccttgaaaaaaatctgccgcttggtcatgcccagcaccaggccggcctcgttctgccccgccggcaccccctggatgccgccccggtaaatctcggaaaaatagaaggcgtagttgatgatgaaggccacgcataccgccgccatccgtcccacctcgccccggggccatgggctgccatcctccagtatcagaccgggcacataaaacagggcgatgatctgcaggatcaggggcgtgccccggacaatccagaccagcagacgggtgaccaggctgatggggcggaaggaaatgagcgcccgggccacccggccgggctcctgcccccggcggagcaggacccaccgggtgggccgggacaggggcgtccagcggttcatggagccgaaggcgatgaccagccccagagggagcgccccgatcagggtcacgaaaaacagctccagggttacaagaaacccttggttcaaggctatcagtaccgtctgggtcactggtgattgaaaaaagtcgagcataggggtcgtcctctctgtctgtgatagtggggcgcaaccgctcaaaagcagagagcggacccgctctctgcttttgagggattcagctgcggagatcgtttactccaggatgacggcatcctgcaggccataggtggcagcaatctgctccacggtgccgtcagccacggcctgcttccagaactcgttgaaagcatccaccaggtcagagcccttgcggaagcccacgccgtagaactcagatgcctctgctctcatgtcgttaaggttaaggtcgtacaccagatcgccgtagctggtgccctcgccggtcatctcggcggccatgagcacgtcgataacagcggcatcggaggtgccggaggcgacctccatcagggtgttggcctgggactgcacgggcacggtggtggcccccagctcctcggcggcgtcctcaccggcggagccggactctacggcgatgctcagcccctccagagaggtcagcccctcaaagtccgctgccctgtcggcggggtagaccagggtctgatagttggtgcagtagggctcggagacgcccatggcggcggtgacctcgtcgttgatggtcatgccgttccatacacagtcaatggtcttggagtccagctcctggaccttatagtcccaggtgatctcctggaactccacgttcacgcccaggctctcggcaaaggccttggccatgtcggcatcaaagccgatccactcgtcactccccgcttccttatagtccatcggggcgaaattggtgatacccacatacagggtgccctggtcctggacataggccaggtcgctttccgcgtccgcgggagtgctggatgccccctggctggagctggcggcgggggtgctggcagcgggggtgctggcagcgggagactggctgctctccccctgagaagtggtcccgccagagcaggcggccagagacaggcacatagtgatcgccattacaagagacaacatctttttcataccgagagatcctccaaaatgcagattggtcaaaaacggggcatttgacactttcacattttagcacgctaatgtaatgttgtaaagaggtttttaattttttttgatctttcggggaaaaagcaagcgtccccccgcagcccataggggacagcggggggacgccttccgcatccgatcagagaggcggcaattacttcatgccgttctcgtaggcttcgatcatcttcttgaccatctggccgcccacggaaccggcctgcttgctggtcaggtcgccgttgtagccctgcttcaggttgacacccacctcgttggccgcttccatcttgaacttattcagagcctcgcgggcattggggaccagagactgcttgttggtagacataattcgtttctcctttacctgttcattttgatcttctttgtttcgttggatggaacatccgagcatagcattgccctggagaagcggactatgcaggaaaaggctttcctgtttttgttgattttccatcattttcagatcagggaaacggcaggaaggaaaccggctcagagaacgggggccgggcggacggcggggctcatccgcggcggcggagacggcgcagcaggccgcccaagggaccggagggcagggcacgggcggcaaattccacctcccggcagctccgaacggcctcgtccatgaagaagtcctgagaggagaggccgggggcgcccggggcgggcacttttttttgatagctcccttcactgtccagggcccgggccttcacggtgtcccgcagcaggatgtccagaatgtgattcaagcgggccttggtgtgggtggcatagacgggacagatgacctccacccggcgctgggtgttgcgggtcatcatgtccgccgaacccaggaagaggcgctggttctctccagagccaaagctgtagatgcgggagtgctccaaaaagcgccccaccacgctggtgacggagatgtgctccgtgtggccggggacgccgggccgcaggcagcagatgccgcggatgatgagatcgatccgaacccctgcacgagaggcctcggccagcttttccatgacatcgtagtcggtgagggagttcatcttcatgatgatgcggccgtggctgccccgggcggtctcttccccgatgagcaggaggatgatctgcttcaggttggagggggagaccaggaggttgtggtagctgccctccagattgcccacagccatgtttttgaaaaattccgctgcatccaggccgatgccctgatccgcggtgatgagggagaggtctgtgtactgctctgaggtcttctcgttgtagttgccggtgccgatctgggtgacgtactggatgccggatttgcctttcagggtgatgagacacaccttagagtggatcttatagtcgctgaacccgtagatcacccggcagcccgcgtcctccaggcgctcggaccagtcgatgttgttctgctcatcaaagcgggcccgcagctcaatgacggcagtgacctccttaccgttttccgccgccgcacacagatactccacgagccgggccttctgggccaggcggtagatggtgatctggatggagaggaccgacgggtcggaggcggcctcccggatcaggcggaggaagggctccatgctttcaaaagggtagctgagaagcagatcccggcgctggaccaggtggagataggtctcccgcttgggcttggggggcgtctggggggagaagggcgggtagagcagcgcactgtggaggggttccggcagctttttcagcatggggtggacaaaccccatgcgcatgggagcccgggagaggaagatctgggcgggggcgacgtggcagcgcttgcagagaaaggcggacagggcctcgctgaggggggcggcgcactccagccggaccacggccatccgtttgcgcttgtgaagcagcttctgcatttggcagcggaagtcatcgtccacatcaaagccctcgtcctggggggcgatatcggcgttgcgggtgacgcagacacagtttttctccgccacgccgtaggggtcaaagacccgcttcaggttatccagaagcagctgttcggtgcgcacatagcgcagtccctccccggggagatagaccacctcgggggcggagggaggcacagggacgatgccgaagaggctgcggtccttcccatggaggcgggccaccacatagacgctcttgttctggaggtgagggaaggggtggttgatgtccacgatctgaggggagaggatggggagcagctgggtcttgaagtaggtcttgagaaagtccttgtccttcccggcgagctggccgggggagacttcgcagaccccataggcctggagctgggtctggagctgggcgtagacctggtcccgctgctccatcagaaggactgcccggcggtagatggcctccagctgctgggaggggagcaggccagtgcggctgtccacctggtcgtcccccatgacagccatgtcatagaggctgcccacccggatcataaagaattcgtccaggttgctggtgaagatggagacaaatttcagccgctcggccaggggattggagggatcgcgggcctcttccagcacccgctcattgaacgtgagccaggagagctcgcggttctgcatgtaaggttggggttcccgggccatcagacagtcacgctccttcgtttcaatacctcggtgagcaggaagccctcccggacaccgtagctgctgacctcaatggcgtcgccccggcaccgatgggccagggtggagaggatgaccagcccggggagcagggtgtggacccgctcggggacgatcttcagcaggatctggaggtccgccttagcgggagcggagaagcgctccaggaggccgtccaccatgttcagggtgatggtgcggttgccggcgggcagcttgtagaggtagttgcacagcttcccggccccgcggatggtgccgcccaccccacagatcaccggacagggaaagtcgggcaggggggcgctgtccagcgcctttttcacctgcttgcggatcttggcctgttctttgggggaggggagcagggtctccacacagcggttatacaggttcagggagcccagggggatggaggcggcgtggcgtatcctgccctgagagaagcagacccactcggtggagccgccgccgatgtccagcaccatgccctgctcccgctcctccatgccggaggtggctcccacatagtccaggatggcctcctcccggccggagaggaggcggatcatcagtccggtgcgctcctggagctggaagaccgcctcctcgctgttggtaatgttgcgcagagaggcggtggcgaagaccgcccggttctcaatgtggagggcatccaggatggaccggaagcggagcagggcatctgcggcccggtcgaggccctcccggctcatggagccgtcctcctgaacatagccggccaggccggccgtctccttgctttgaaaaatgctgtggatagctccgtcctcctccacctgatagacattcaggcggatggtattggagccgatgtcgataatagcgtacatgcaagctctcctctgtggctgcggtccgctcggaagcgggaccggatcatctgagtcgtatgatatcaaatgcagggggctgggtccagaaataggatgcagaattttggttaaatgtatgtaaaatcactggctgaacagacaagacgatgatttttgacggcagagtatagagatccccggggaaatgtggtaaacttccttcatctggagatcttacagagaggaaggaactgagcatgctgtcttttgtcaacgactactctgagggggcccacgagcaggtgctccggcggctggcggagaccaatcgggagcagcatcccggatatgggaccgatccatactgcgcccgggcaaaggagaagatccggcgggcctgcggctgcccggagggggacgtctttttcctggtgggcgggacccagaccaatcaggcggtgatctccgccctgctggccccctgggcgggggtgatcacccccgccacgggacacatctgtacccatgaggcgggagccatcgaggcaaccgggcataaggtactggagctgccccagcgggaggggaagctgtcagcggcggagctgcggacttatctggagggcttttacggggacgagaaccacgaacacatggtctttccgggcatggtgtacctgtcctggcccaccgagctgggcaccctctatacccgggcggagctgggggagatccaccaggtgtgccggcaatacaagataccgctgtacctggacggcgcccggatgggctatgggctggccagccgggggagcggcatgaccctggcggacctggcggccagctgcgacgtgttctacatcggggggaccaaggtgggggccctgttcggagaggcggtggtcttcccccggcacaacgcccccgggcgctttatgaccgccgtgaagcagcggggcgccctgctggccaagggctggctgctgggggtgcagttcgacgccctgttcaccgatggactctaccagaagctgggcaaaaatgccatcgagacagcggagcggctgagagagggattccaggaaaaggggttctccttctatttggacacccccaccaaccagatattcctggtggtggaccgggcccagcgggaggacctggcccggaaggccgcattcagcttctgggagcagctggacgaggagcggacggtgatccgcttcgtcaccagctgggccacccggatggaggacgtggaggagttgatccgccggctgtgaagcgggctgtttgaatcatttgggaggaaaaaagagattgttcttgttggaaatagacaaaaagattgacaaataaaagaaaaagatatatattattctgaaagaaggcgggggcgatggtcagataacggagagatgtatgaaaaaatcagtgagaaatttcataaaaatctattgggaagttctgcttgtagtggctgctggaattgcaggtgtgatacttttaaaagtaaaaggtgaagattggcctgctgcgttgaattttcccacagaggcagtagcggctggctattggatcttgatactgggaatgacggcattagaaggaatcctgattttccgttttctggtgaaagggctgaaatatgtaatatatactgttctgccgctatggctctaccttatgtttgcctcgccaggaggactgcttttcccaagcctgatttggacatatagcttggtgatcctgatcgcccggcttgtgatgctgataaggtgcaggctaaaaaaacaggaccggcagttttctcatctgtcatctatgatatgtattgatgtgatcagcaccataaacatccttcgagaatttgtattgtttggatagcggtaaaaagcatcggccccatccatcacggatggggccgatgctttttatcggtaggaatcggccagggccttgaatttgggaagggcccgctggatcatgtcggtctggacgcagtaggcgatgcgcacgtggccgggggcgccgaagccggagccggggaccagcagcagatcgaactgcttggcccgctcgctgaaggccatatcgtcgggctccagggagcgggggaagaggtagaaggcgccgccgggctccacacagtggtagcccatctcccgcagggcggggaccagcagcttggcgttgcgctcatagaccgccaggtcggaggtgaggtcgcagcacagggaggtgacctgctggaacaggctgggggcgttgacgtagcccagagaccgtccggcgccggccacggcggcgtagacctcccggctgtcggtgacggaggcggggaccagcacgtagcccaggcgctcaccagggagggagagggacttgctgaaggagtagcacacgatggtgtctgggtagagctggggaatccagggcacctggaagccggagaacacgatctcccggtagggctcgtcggagatcaggtagatggggtggccgtaggcccggctcttttccgtcaggatggcggccagccgctccagcgtctcccgggagtagaccacgccggaggggttgttgggggagttgaccaccacgcccttggtgtgctcgctgatggcggcctcaaaggcgtcaaagtcgatctggaatccctcgatctccgggggaatgagcaccatcttggccccagcgccctcgataaagaccttatactccgggaagtagggagcaaagacgacgaactcgtccccggggcaggtcaggccgttgaacacacagcacagggaggcggcggcccccacggtaatgtagaactggtcggcggtatagcaggtgccgaagcggcggttgagggagtcggcgaagcgctggcgggcctcctggtccccctgggcgctggtgtaacagtggatgacctccggctgctcccgaaggatgcggacggcggtgtcgttgacctcctgggggcaggggacgctggggttgcccagggagaaatcgaagacattctccgcccccacctgggcggcacgtatcttgccgtattcaaagagctcgcggatgacggaccgggcggtgcccagccccaacatgcgttgattcaccatgaagatggcctcctgtcctttgtctgatttgagcctattatagcaccggggccaagccccgtaaagcgcatcttttcccgcagaagggaggagaagcgggccgggcccgctctgccgcgcgcagcggcggcgtcaggaggcgccttgaaaagtgaccatatcagatgccgagtcaaaacatgtagtaatttaaaattggtatattgcgataagttttaaaaatctggggggagatcaagccgatccagtcagcgtcccgaagaaatggtgcccatgcgccgccgtcgaaaatgcccagaaaaacaggcgtaaaaacgccgcactcccacgggagtgcggcgttcaaattctcacatctcctgacggccctccagggcccgcatcagggtggcgtcgtcggcgtactccaggtggctgcccaccgggatgccgtaggccagacgggtgatcttcaccccaaaggggcgcagcagccgggaaaggtacatggcggtggcctccccctccgtgtcgggattggtggccatgatgacctcctggaccccgccggcggccacccgctctaccagggacttgatgtgcaggtcatccggccccacgtggttcatgggggagatcaccccgtggagcacgtggtagagcccctggtactcccgggcccgctccatggccaccacgtccttcgggtcggccaccacacagatgacggaggcgtcccgcttggggctggcgcagatggagcaggggccgtccccctccgtcagattctgacacaccggacagcagtggatggcggacttggcggacagaatggcctgggcaaaggcggcggcgtcctcctctgggagggagaggacgtggaacgccagccgctgggcggatttgacgccgacgccgggcaggcgggcgaactgctccaccaaattttccagtgcgggggggaaatactgcatgggaaagacctccggagtcgtaaatagtacacggtgtgaacagggggagatcagcgctcccgctccaacacgacggcaaacagatagctgacaccggccggaaagccggcgggatagggcgtgagggaggtggtccgccacccggccagggccatgtcgttcatgacctgctccgcctgctccaggctgtcagcggagaggatcttatactctctcaccgcgcaccccccctgacacgcggagggcctgaatggcggcggggatgtcctccgccccgtagacagcggagccggccaccagcacgttggcccccgcctccaccaccaggggggcggtcttgggggagatgcccccgtccacctccagttcgcaggcggggttgtaccgctcgatgagggcgcgcacctggcggatggtgtccagctgggactccatgaaggcctggccgccgaagccgggctccaccgtcatcaccagcaccaggtccagctcctccagataggggaggatggcctccgccttggtgatgggccgcagggccaccgctttttttacgccgcactcccccatgaccctcagagcctgggcgatgcgggtggggtggtcggcctccaggtggatagagagcaggtccgccccagccttggcaaaggcttcgatgtaccgcaccggcttttcgatcatcagatggacatccaggaacatgtcggtgcaccggcggatggactggaccaccgggacgccgatggtgagattgggaacgaaagcgccgtccatcacgtccacatggaggtagtcggcatcggagacccgccggatatcccgttccagattgacaaaatcagcggagaggatggaaggtgaaacttttatcatggttttgaccccgctttccgaaaaaatgagaggttttgatcagggctgtaggggctgggccaggggcagagggccggtccgacgcataggatgcagagcggagagcgggagggcggaagcactccccggagccccggacccgaggcctgctccaggctgatcccacggccgcccggcggccccggccgatccggatggcccgccgcttttcagataccccccgccgggccctgcccggcgggggcagtggctgtgcgccggcggggcggggcccccgggctcaccagtggttgtagctgaggatgtcgtccagctccttgcgtaccttgggccggggagcggtctccttggcgggatagcccacggtgacgatcaggcggacgggccgctcctccgggatgccgaaggactggtgcagcttggcctggttcatggtgccgatgaggcaggtgcccagccccatggaagtggcctcatagcacagggccatggcagccatgccgatgtccatctgggcgaagtgctgggcaccgtagtgctccgcgacgccgggcttgacgtgtgcctcatcctcacagatcaggatgaagttgggcacccggtctccccaggggcagccggtgagcccgtcgtcgtccagcgcctcaatgagcttggcccgggcctctggctcgtcgatgatgatgaagcgccagggctgggcgttgcagccgctgggggccagccgggctacgtccaccaggtgggccagggcctcccggggcacggggcggtcgctgtacacacggcagctctcccgggccgcctgcaaagcctcaaaatccatttcaaagatcccctttctgttttgttggatacggtctgacgtgggggcttccccaaaaagagcgcaagtcaacagggccggatcagtgatagaaatcggtggtgtccacctcgtgggcctggtagccggcctggctcagcgcctccaggatgcggtccttgtggtcgtggccgaaggcctccagggtgaccttcagctccacgccgctctggcggttgatgttcacgaactggttgtgctccagcttgatgacgtttccgttctcccgggccaggatatcggcgatgctgagcagggcaccgggacggtcggggaggaggacggagaaggtgaagatgcggccccgcatgatcaggccgtgctggaccagggaggccatggtgatcacgtccatgttgccgccggagaggacgcagaccacgttcagcccctggcaggacaggtggcgcagagcggccacggacagcaggccggagttctccaccaccatcttatgcttttccatcacatccaggaaagcctccaccagctccgtatctgggatggtgatgatctggtccacatggtcccggatgtaggggaacaccttgtctccaggggtcttgacggcggtgccgtcagcgatggtgttggcggtgggcagggagaccacatggcccgcctccaggctggccttcatgcaggccgccccctccggctccacgccgataacttttacgttggggttgagcagcttggccagggtggacacacccgccgccagcccgccgccgccgatgggcaccaggatgatgtccacgtcgggcaggtcctggaagatctcataggcgatggtgccctggccggtggccacctccaggtcgttgaaggggtggatataggtcagcccctcctcctccgccagcttggcagccagctcggcggactcgtcaaagacctcaccgtggaggatgaccttggccccgtagtccttggtattgttcaccttcaccaggggggtggtggtgggcatgacgatggtggcgggcacgccggcggcctgggcagcgtaggccacgccctgggcgtggttgccggcggaggcggtgaccaggccacgttcccgctgttcctgggtcagggtgctgatcttatagtaagcgccccggatcttgtaggcgccggtgacctgcatattttcgggcttgagatagacccggttgccgcagcccttggacagggccggggagtcgatgagactggtctcccggatcacgccctttaagacgctccgggcgtttttgaactgttccagtgtgggcatggtcaaaacttcctttctgcgcttggacgacgtattacataaagtgaatcatacccaattccgggaggaaagtcaatggagggggcgggagcgggagcggatttttttagaaaagggtggaattttgcgggaagggggagggggacgcttgcgcagctgccgggggatggagtaaaatagagaaaaaacggggggagagcgccatggggggactggggagaaaaggctggaggatcggcccgtggcagcgcaggctgctgatcgggctggcagtggccctgacctcccagctgtatctgacagtgtgggcggagggcttccgggtctccaccgccgccatcctctacccggccctgctggtgaccatgatgcgggagagccaccgcccggacactgggctggtcaccggactgtgcgtggtgatgatgcggctggcactggacctggcggcagggatgccgccgggggaggcgctgcggatggagtatcccggcggcgtgttctacctctgctatgactgcgtgctctgcctgctgatccgggaccggcgcaccgcctctctggggcggatgggagcggcctttctggtcagtgactttatctccaatgtgatcaatctgtacctgtcctccggagtgcgggggctggagacggaggcccgggccctgctccccctgatcggactggcggtggcccgatccttcactgcggccatgatcctgtggggaagccggtactaccaccgcctgctgctgcggcaggagcacgagcggcgctaccagcgcctgttcctgatgacggcggagctgaaaaacgagctgtactttttaaaaaagaactccgacgacattgaacaggtgatgaccaacgcataccgcctctatgagcggctgggggagaaggaaggggagagcggtgagctgagtgccctggccctgtccattgcccgggacgtccacgaggtgaaaaaggacaacctgcgcatcatccggggcatcgagggggaggtggaggaggtctatgaccaggagcagatggaattccaggatctgatgcacattctggagaactccacccggcggatgctgggggagaaccgggccagcatccgcctggagtgcaggcgcaccgccgacttctccacccaggagcactaccgcctgctgtccatcctgaagaacctggtgaccaacgccatcgaggccattcagggagctggcggccgtgggatcgtgctggtggaggagcgggtggagggtgacactctgtttctcaccgtgtcagacgacggccccggtatctcggagcgctccatgcacaatctgttccaggtgggctattccaccaaatttgacccggagaccggcaacatcaaccggggcgtgggcctgcccgcagtcaagtcgctgacagaggagctgggcggctccgtctcggtggagagccagccggggcggggcgcgcgtttttccgtggagctgccgctccaccgtgtgaagggggagaagagagagaaatgaggatctatatcgcggaggacgacccctcggtgatcggggtgctggaggatatcctggagagcagcgcactgggccgggtgtgcggcgccagcgaggagggggccccggacccggagcggatcatggcgctggacccggatctggtgctggtggatctgctgatgcccgggcgggacggcatccagctggtgcgggagctgaaggagctgggcagccgggccaagttcgtgatgatctcccaggtgtcggccaaagagctgattgcaaaagcgtatcaggccggggtggagttctttatccagaagcccatcaacctgatcgaggtgcgccaggtggtgggcaacgtgatccggcagatggagaacgagagggccctccacaccatccagagcgtgtttcagagccgggagtcccagcccgccgctccggcggggcggcaggaggtgtggcgccggcgcatccagtacatcctgagccagctgggcatggcaggggagaagggggccggggacatcatggagctgtgcctcttcctgctggagcgaaagcagacggcctctcagatcggagtgggcaccctgtgcagccagctcagtgacagccccaagaccatggagcagcgggtccggcgggcggtggagcgggggctgggccatatcgccagcctgggggtggaggactatgggaacgagttcttcacccagtatgccgcggtgctcttcccctttcccgaggtgcgggctgagatggcccatctgcggggaaaagggggacgcggcaaggtgaacctgaaaaaattcctggacggcatgctgatcctgacagaggaatactgaagcgcacagctggccgccctgggacaacgtcccggggcggccagcttgtcaaaaaagccctcctgcaaggagttccgttgcccgcaggcgacggaatcaaattaaatcacgtcatttccgggggcgtgtacctcggaaatgacacctcttacgcaagatgggcccactttcctgcaagggatcgggacccagcttgcgtgcttgctttctcgaaaaagcggctctgccgctttttcgacagtctggccgccccggaacgttgtcctggggcggccctctgtctgatttatttggcgtcggggcacatcagcaggtacatgacggccttctgggcgtggaggcggttttccgcctcgtcaaagatctcctgggcgtgggcctcaaagacctccgccgtgatctcctccccacggtgggcgggcaggcagtgctgtaccatacaccccgggttggtgagggtcataaggcggtcgttgacctgatagccggcaaaggcggcggcccggacggcacgctcctcctcctggcccatggaggcccacacgtcagtaaagaccacgtcggccccggcggccgcctcctggggggtgcggaccagggagaatttaaagtccggctggctggcggcaaatgcgagcacctgggggtcagggtcgtagccggcggggcaggccaccgatacctccatgccgcacttcaggccgcccacgatgagggagttggccatgttgttgccatccccgatgtagcacagcttcaatccctccagggtggccttgtgctcccggacggtcatcaggtcggccagcacctggcaggggtgacagaagtcggtcaggccgttgatgacggggatgtgggagtgactggccagggattccacctcctcttgatggaaggtgcggatcatgatgccgtcgcagtagcgggccaggacccgggcggtgtcctcgatgggctcgccccggccgatctggctctccttgccggacaggaacagagcgtgtccgcccagctggtacattccagtctcaaaggacaccctggtccgggtggagttcttctcaaaaatcatggccagagtcttgccccggagatagtcgtggaccagaccgtgcttctggctgtatttcagctggtcagcggtgttgaggatcttgatgatgtcctccttggacagatccagcagcttgagtaagtctttctgcatgataaaaacccccgatgttcagagtgaggatgacagagggagcgggcctgccctccgcgatgaagttaagaaagcgctgctttcaggatggccaggcccttgtccatctcctcctgggtgatgaccaggggggggagcaggcgcaggccggggccagcggtgaggaccagcaggccgctctggatcagcttggcggccagctccttgttggtgcgctcccccttcacgtcgatgccgatcatcaggcccatgccccgggtggcgcccaggcatggcaggtccagggcctcaatgcggctgcggagatatgcccccttctcctggacggactggaacatggcatcgtccatccggtccagcacgtagcaggctgcggccgcggagatggggttgcccccgaaggtagtgccgtgggtgccggtggtgaagacattgcggcacttctctcccgccatcacgccgccgaagggcaggccgccggcgatgcctttggcgaaggagactgcgtcaggctggatgccgtactgctggaaggcaaagagagagccggtgcggcccacgccggtctgcacctcgtcgatgaggagcagccagtcccgcttggcgcacaggtcggccaccttctgcacaaactcccggtccagggggagcacgccgccctcgccctggatgagctcgaacatgacggcgcacacatcatgtccggccatggcttccacgctgtcgaagtcgttggcgtcggcgtggcggaagccctcggtaaaggggaagaaatagttgtggaacacgtcctgcccagtggcggagagggtggtgatggtgcggccgtggaaggacttgtggagggtgatgatggtcccccgtcccttgccgtacttgtcaaaggagtacttgcgggccagcttgatcaggccctcgttgctctctgcgccggagttggcgaagaacacgttggacatgcccgctttccggcacagcttctccgcggccttcacatagggctcagcgtagaacaggttggagatgtgtcccagcttgcctgcctgctcggtgatggcgttcacccagccctcgtcggcgtagcccagggagcacacgccgatgccggaggtgaagtcgatgtattcccggccctgggtgtcccagagggtggcgcccctgccgtggtctacggccacgtcgaagcggccgtaggactgcatcacgtactgatggtccagtgctttgatctcttcaaaggtcataacgattctccttccggcgctcctggttcagttgaccagcatggtgccgatgccctcgttggagagcagctcgatgaggatggaatgggggacgcggccgtccaggatgatggcggacttgacgccagagcggaccgcctccacgcagcagtccaccttggggatcatgccgccggagatgaccccctcccggacaagggcggggacttgggagagctggagctccgggatcagggtacgctcatccttcgggtcccgcagcagcccccgcacatcggtgagcaggatcagcttctccgcccccagtgccaccgccagcttggcggccgccgtgtcggcgttgatgttgtaggaggtctccgcatccgtccccagggccacggtggacactacggggatgtagttgttgtccagcgcgtcgttgaccggggtggggtctaccttggtgatctcccccaccaggccgaatctctcgtccagaagacgggcctggaacagcgcgccgtccaggccgcacaggcccagggcccggccgcccaggcggttcagggtggccaccagattcttgttcacccggccgcacagcacctgctgtaccacatccatggtctcctcatcggtgtagcgcaggccgtccacaaatcgggactccttgcccgtctttttcagcatctcgctgatctcaggtccgccgccgtggacaaccaccacccgcagccccaccaggtggagcaggatgatgtcggagatcacggcctgccgcagctcgtcggagatcatggcgttgccgccgtacttgaccacaatggtcttgccataatatttctggatatagggcagcgcctcggccagcacctgggcgcggtccacttcattgaaggacatgcgtattccccctcaaacagtaaaatatggggagggaggagccggagcacatggcggcgctccccgtgcctcccttccctctgggccagggatcaggtgcgatagtctccattgatcttcacgtagtcataggtgaggtcacagccccagcactcggcagcctcgtccccctcgtgcaagtccacaaggatgaccacttccttctcgctgagaatgcgcttggcggcgtcctcgtcaaagggcaggccgtccccctgccggcagaccgggacggaacccgcctgggactggaaggtgacgtccacatgctcggggcggaagggggccttggagtagcccatggcgcacagcacccgcccccagttagcatcggaaccgaacatggcggccttcaccagggaggagccgaccaccgccttggccaggcgctcggcgctctcctcactgcgggcgccggtcatcctgcaggtgaccagcttgctggccccctcgccgtccccggcaatggagcgggccagctggcggcagagctcctccagggcggccaggaaggcggagtagtcctcgtccttccactcgatgagggggttgccggccataccgttggccagggccagacacatgtcgttggtggaggtgtccccgtccaccgttacccggttgaaggtgcgggccactacctcccgcagagcgtcctccagcatctcgtgggtgatggcacagtcggtggtgatgaagcagagcatggtgcccatgttggggtggatcataccggagcccttggcgatggcacccagggtgacctcttttccacccagggtgagggagaaggccagctccttcttcaccgtgtcggtggtcatgatggcccgggccgcatcctcggagccctccgggcccagcttggccgccagggcgggcatcccggcctggatggcggtgatgttgatggtctggccgatgacgcctgtagaggccacggcaaaatcctcgggggcccggccggtggcctgggcggcggccagacacatggcctgggcgttctcgtggctcatgggacagcaggcgttggcgttgccgctgtttgctaccacgccccaggctaccccgttctccaggtggtccatggtgacgtacaggggggccgccttcacccggttgagggtataggtggcagcggcggtacactccttctcagagaggatcagggcgaggtcgtttttatccgggctgctgctggccttgacgccgcagtggacgccggcggccacgaagccctttgcggcgcagacgccgccagatacctgtttcatagctgtacagacttcctttccagcaaagtgccccagaagggggaagggaaattctcagttccattaaaccgccggtccggggctttcgtcaagtcccggaccagaaatttcagaaaaaagagggagaatggccgcctatttcagctcaggctcagcccttcggtctcctcaaagcccagcatcagattcatgttctgcaccgcggcgccgctggcacccttgcccagattgtcgaagagggccgtcaccgtcagctggccgtcgttgcccgccacggtgagggtcaggtcatcgtccccggccttgcccgcgccatagagcttgccgtcggctccctcaggggccacgcggaccagcttctgcccggcgtagtagtcggagagggccttccacacgtcgtggaggctgctcacaccccgcagctgagacaggtgcaggggtacggtggtggccatacccttgtaatagtcgtccacaatggggctgaacaccggcggacagctgaggccgcagcggacctgcatctccggcaggtgcttgtggctctgggtgatgccatagatggcggggctgctcaaaaggtcctcccgcccctctgcctcatactgggcaatcatcttcttcccgccgccggaatagccggtgagggagaagcagctgagaggcgtgtcggcgggcaggatgcccatgcccaccaggggatagacaatgctgatgaacccggtggcgtggcagccggggttcgagacccgcatgctctcgcagatctgtgcccggtggagcttggacagctccgcaaagccgtaggcccagccgggggcggtgcggtgggcggtggaggcgtcgatcaccttggtgttcccgttctcaataagggagaccgcctccacagcggcagcgtcgggcaggcacagaaagaccaggtcggcggcgttgaggaacttgcgccgctcctcggtgtccttccgcttgtcctcgtcaatgagcagcagctccagatcgtcccggccgcccagccgttcatagatctgcaggcctgtggtgccctccttgccgtcaatatagatcttgggtttgttcataaggaccacctgatttttgaaagataagttccgatcgtctgtgtgtcctgccccgcgggagaggggagcacaaaaaggcccccgccaggaacacaaaaggaaatgggggaggaatagaagtcagctccgctgcgcaaggaatccctcgatattggagatctgcttctccacgctctcccgggcgggaccgccgtagacgctccggccgttgacgcaggtctttaactccagggccttgtacacatcctcgtcaaacagtccggagatggcccggaagtccttcagggtcaaggtgtccagggtgtccccggtcttgatgcacaggttgaccaggcggcccacgatcatataggcctcccggaagggcaggcccttcttgaccaggtagtcggcgcagtcggtggcgttgatgaagccgccggccgccgccttggccatgtttttggggcgcaccgtcagggtgtccaccatggcggcgaagacgggcaggcacagctccaccgtgtccacggcgtcgaacagggcctccttgtcctcctgcatgtccttgttgtaggccaggggcaggcccttcatcatggtcagcagggtgaccagatcgccgtacacccggcccgtcttgccccggaccagctcggccacgtcagggttcttcttctggggcatgatggaggagccggtggagtaggcgtcgtccaggtccacgaacttgaactcccaggagcaccagaggatgatctcctcggagaaccgggacagatgcatcatcaggatggacagggcggagagcagttcgatcacatagtcccggtcagagacggaatccatggagttgtcggtgggctttttgaagcccagggcctgggcggtggcgaagcggtccaccggataggtggaggtggccagggcgcccgcgcccagggggcactcgtccagccgctccagacagtcctccagccgggtcacgtcccgcttgaacatgttggcgtaggccatcatgtagtgggcgaaggtggtaggctgggcccgctggaggtgggtgtagccgggcatcacggtgtccagatgggccttggccttcttcaccaggacccgctccaaatccagcaccttgccgataaggacggggatctcctccttcacatacagacgggtgtccaccgccacctggtcatttcggctgcgggcggtgtggagacgcttgcccgcatcgccgatgcgctgggtgagcatggcttcgatgttcatgtggatgtcctcgttgtccagggagaactccacaccatccccttcgatctcggagaggatggtcttgagaccgttgatgatcttctccgcctcgtgctcctcgatgatgccctgccggcccagcatggcggcgtgcgccatggagccctggatgtcctgcttatacagccgggcgtcaaacccgatggaggagttgaagtcgtttactaaggtgtcggtctctttctgaaaccggccggcccaaagtttcatattgaatcgctccttaattaggaatgaggaattaggaattagaaattgaggggtccggcgaagccagacggcttgaatttcattcgccgcaggcgaatccgtttattcctcattcctaattcctaattgaaatttatttcagctttccctgctcccgcagcgcctggacggtatcgggcaggccccacagattgatgaagccagtcgcatcgtcctggttgtagtcgctctcctcgaaggtgactaggttctcggagtacaggctctcgggggaggtgacggaggcggtgatgatattgcccttgtacagcttcagcttcacctgtccggtgacatgcttctgggtgtccacggcgaaggcggtgagggcctcccgcaggggggtgaaccacttgccgttgtacaccaggtcggcaaagtccaccgccagcttctgcttcatgtgcttggtgtccttatcaatggtgatcatctccagcacctcgtgggcccggtagagaatggtgccgccgggggtctcgtacacgccgcggtccttcatgcccaccagtcggttttccacgatgtccagcagaccgatgccgttctcaccgcccagctggttcagcttgcggatgatatcgctggctttcatcttctcgccgtccacggccacaggccagcccttctcaaaatccagggtcacataggtggcctggtcgggggccatggcgggggagacgcccatctccaggaagccgggcttgtcgtactggggctcgttggccgggtcttccaggtccaggccctcatggctcaggtgccacaggttcttgtccttggagtagttggtctcccggctgatcttcaggggcacattgtgggactcggcatagtcgatctcctcgtcgcggcccttgatgtcccactcacgccagggggcgatgatcttcatctcgggggcgaagcgcttgatggccagctcaaagcgcacctggtcgttgcccttgccggtgcagccgtggcagatcgcgtcggcaccctccgccttggcgatctctaccagccgcttggcgatgatgggacgggcgaaggcggtgcccagcagatagtcctcatacttggctcccatcatcatggaggggatgatgacgtcatctaccatctcatctgtcaggtcctccacgtacagcttggaggcgccggtcttgatggccttctcctccaggccgtccagctcggtcccctgtcccacatcgccggagacagcgatgatctcggggtcaccgtaattctctttcagccaggggatgatgatggatgtatccaggccgccggaataggccagtaccacttttttgatttgagacatagttcatttcctcctgattatgggcgggcgtggggccggatcagggccgccgcagctccgcatcattcaatgttaagggaagtctaccaccgtttaaagcaaaaagcaagtgctgaatcgtatgattatccagaaacgacaaaaaatattccgtttactttcaccaaaaatgaatattatgcaaagaaaaatgaataaataggcataaaaatcgtgcatccgggggatgcacgatagcaagcgtgggtcacagcatggacaggccgaaactgttggccagggcatcgatcttctggccggcccggcacatggggcactccttgggggagctggagatatatccggcgatgtcgtcaggggagaaaagactgtacaccgggatgccgtccacctgttccagcatgctgaagatggcggcaatgccctggaccttgccgccgtaatactggacacactccagggtgcgccgggcgctcttgccggagttgacggtggagatcaggatcagcacctcccgccccacgatcatgggggtcaggttgtcccggaagatcagctgcccgttggagtcatactccggggtgactacgttaatgtttttgttgctgttgacggaaaagacttcctttttggccaggtggcgggcgaggaacgcgccgatgacctcgctcccgtccagacatacgatggtgtccacccccttgtcataggcgtagttctgggccagggtcatggcagcttcccgggccatggtgaactcgtgcttcatgcgggtgatgtcgatgtagtggctgttgtgggagtgccgggtggcaaaatgcccctggaagaccgacacctcaagctgggggttgaatctcgatgtaagctggatcgcgttcatattcttacctcccgtcttgtgaaaagtgtttggcatatccgcttttaatataacactgattggagaatattacaacagaaaaaagaggcatgagggagatccagagcagatcaaaagctgcggccccgccttccggcggggccgcagaaaatttgtcgaaagcttgcccgcagaaaagagcgcgggtcagccggcctgaagggaatcaatgatggagtcaaagaccgtatcctggtcctcacacatcaccatgaccacggtcccgtcctccagcgtctccaagcgggcgttcttggcgacctcatactggtcaggcagatacatctggaaattctgctgctgctggtcgataaagccctgaaggccctctttcaccgtgtcctcgctgtcctgtgcgggcttgatgacggcaatgccgtaggccttgacgttcatcagtgacacactgatggcaaaggactccatatcctcggcggtgacccctaggagctggaaagtcatatccgccgtgtcgtcatccgcggagctgaggatgctgttgtattcgttgtcctcctcgctgcgggcatcggtgatggcagtgacgaagcgctgggtgcgctcctcaggggtcaagctgtctgtctcaccggtgccgccgccggagcaggcggtgagggccagcagagaaagggcaaggatcagagtaaagattcgtttcatttgggttctccttattatgatatttgagatttttgagggaagttcctctgtacactcttttggacgacaggaattaagaaaagttcccagcaaaaaaatattattttgcaacgaagagccttcggacgaccggagcggtccgaaggctctgttataactgattcggtgtggagaggcggatgcttggatcaggagggcccagacgggagaggatgtcaggggtagggtccacatacagcttctgcgctcctccatctagaagggcagtgtggccttccagggaagctgagagatcgagcttcaccagggcggggatggagagggctcgggacagggcagcggcgtggctctgtacactgccgcgcatagcaataaagcccaaaatacaggagcggtcgagggtgatgatctggctgggagcaaattctgtgctcaccaggatagaaggagagaaagacacggggggcacagcgccgcggccggtgaggatacggagcattcgatcggagatggcccggacatcagaggcgcgggcctgcatataggggctgtccatctgctcaaagagggataccaggtgatccatagcagtcttagaggcatgctcagctgtacagccgcaggaaaatatcatggagtagacagtgtcctgatagtcttggtcatccaggagcatggcgtggatggcaaaaatggtggccagcttttcccccaccatctggacagcttggtcatagagctgggccagctccagtactgcctggcggtgagccgtggagaagcgctcccactcctcttctggcgggaggggagaatgagcagatatcgtcggcggtgcgggcgtaaggaaatgaagagggccgaaaacgacatcagatgaaattgactgtccggagaaaatctgcatggttgttcacctctacccggcgggaagagctatccgccggccgcatgtggaaaggaaaacggcagaattgttttatattcattataagcgtacagcgggaatttgcctattggacaaactgaataattatatgagaacttcccgcggagggaatcattgggaatttacaaatgctggggtataaatttgaattccagtcatccccaaaacaggatgggaaaggggataaaaaaatttgcggtaagggctttacatttttgataaatctggtataataaaaacctgtctaaaggctgccccctgctgtgaagggcaggatggtcccatcaacggcctgtcataaaacgtgtttcttttgaagaccggcatataaaacaaagcaaagtgcttcaaattatataagataactaaatatgggcctatagctcagctgggagcgcaaagggttcggttttctgccacacctaataatttcatattgtttcttctgttccgcttttggaactgttgatttgggcccgtagctcagtctgggagagcgtacggttcgcatccgtaaggtcgagggttcgatccccttcgggtccaccaaaatgaatgaccccacccaatttgaacaaacgcttgtcgttgttcagaacgggtggggtcattttatgcctgaactccttgcattgcaaggggttcaggcctttctgtatttcatgtcttgtgtcacctgaaaaatacaaacagggtaaaatcaaaacacaaaacgtgtaatcgacgagattcgaacccctgttatgtcagtaagttgctctcctcatttgccgttcatgaacaactcttctacctgacaaggtgttcggtttttcaatgtgcgatgtggccgctgtgtgttgtaaaactcgatataagatgcaaggcatcgtttgaaatctgtttcggaagtgtagtccttcctgtaaagctcctcctttttgagtgtagcgaagaacgattcagcaacagcgttgtcatgaggccgccctgaattggagaaagattgtaccacagcgtgctcatgtagtagctgtttgaatcgatgcgaggtgtattgagcacctcggtcactgtgaaagatgagttttgtttctgggtttctttgtgcccatgccattttgaaagtagatgtgatcaactgggtgctgttctttctggatactttgtatgcgacaattttgcgggaaaacaaatccaaaatcacacaggtgtaaagatagaactcccccagcttaaaacaagtaacatcgctgacccagatttggttgggcttgtccgcctgaaactgctgctggaggatgttccgtttcttttccggttcatgaagtttcatgtagtcctgttttgcagtgctgcggatactagctaggcccatctctctcatcagttttgccacatat

SEQ ID NO: 13526 - DNA, 3113 bp, Unknown
  gut microbiota DNA sequence
ggactccccctgccggcggcagccggcgccgcgtgtgcggcggagctgggcgggattcacttccgcccagcgaaatgaaatgaaacggggcccctggcccgctactggcgggctggggctgaggacgccctgaaatttggccgcaggctggtggaggactacgccgaaaacgcccccaaagcggaaccgtagggcggcgcgcaaaacttccggttgtatccgctggggaaatggtgtacactggaacaggcttttggaacccaaataaggaggacaaacacgcatgaacgtgaaacagtttctgtgcgccggcatgaccggggcgctgctcgtggccggactgacagcctgcgcgcccggcgcgccggaggtggacccgtccgacgtggcctatcagaccgccggtgtgaccagggacacggtgctctttacggtggatggcacagaggttaccgccgacgagtacctgttctggctgctccagagcgtggcctcggccaagcagagcggttacctggcggacgacgacgcttgggaggaggagctcaacggcgtccccacggcggagtatctgaaggaggacgcgcggaacaccagcgtgctctacaccacggtgtccaaccacgcggcggcggcgggactgaccgtgaccgaggaggagcaggccgaggcggacgctgagctggagacgctgacccagcgggtggacagctattacgggatgacccttcaggagtacttggaccagcagtgcatcagcgaggcggctttccgcaagctgaaccaggtgccctatctggcccggagcctccagacccagatggaggaggcgggggagctgaccgcccaggacgccgatctggatgccatggtggaggaggcgggctactacaaggccaagcacatcctgctggccttcccggagaacgaggacggcagcgccgccaccgacgagcagaaggccgccgtcaaggcggaggccgaccagctcctggcccagattcggaccgccgcagaccccttggcggagtttgacaaggtgatgaacgagcgcagtgaggacggccgggacgagaacaaccagctctatgcgcccgacggttacctggcctatgccggccagatggtgccccagtttgagagtgccgccaaggccctggccgtgggtgagatcagcgagccggtggagaccgactacggctaccacatcattctgcgccaggactttaccgacgaggagcgccagcagctccgggacagcatggcggccatctaccccgattacgccatgagcaagctgaacgagcagtgggtggaggaggcgaaggtagaggtcaagcccgcctatgagaagctggatcccaattccttctacaagaatatggtggcctttgccgagcagtggcaggaggagaaggccgccgaggaggccgctcaggcgaccgccagtcccgcgcctgagaccgggaccccggcacagagcacagagcccgcaccggatgccaccgggagcggagcgcaataagcacaggcaaaaaccccgccgatccggcggggtttttcattaaaaaactatagtttataataaaaattctattgtttatagtaaaaatccaaagttgtgtcaatctatatctaaagtttggaacaaagggtgagacacaatggaggacaaggagaaaaagctggcgctgcaaaaggccgtgggcgagcgggtgtaccacagccggaagctggcgcggatgagcaaggaggagctggccgagcgcctgggcatctcctcccaatatgtaaatgatattgaacaggggaaaaagtgtatgtccatggcgatttttgtggagctgggcgaggtgttccacacagggctggatgagctcgcccacggcgcacagaaggaggagcccgtgctggagcacctgctctgccacctgcgccagctctctccggtgcagcgggatatggccgttcacatgctgcatctggcgttccgggccgcccaagagctgggcccggaggagtaggcgtggcgctggagatccgggtcctggtggtggaggatgatccggagacccggatgctgacggaggcccttctgtccggacggaagggggtctgtctgtgcgcgctggcaaaggacggcctggaggggctggagctggtggagcagaccaggcccgatatcgtgctgctggatctgattctgcccgggatggacgggcttgatttcctccgcgccctgcgccgccgaagcgcgcgcccggctgtggtggtggcctcccaggcctcggagcccacagtcatccggctggcctttcagcttggggccagctactatctcataaagcccctcaacttcgactccctgcccgacctgtttcactcgctctgcctggagccccgggagcgggcggcggcggactatctgcgggggatgggcgcgtccgggctgggggtggaggccgccgcgcggacggcggccgtgctctccacgggcgcggagggggccattccgctcaaggaggggtatgccgccgccatggcggcccaaaacaccagctacgcctgcgtggagaaaaacatccgctccatggtgggcaagctccaggccggggcctgcggggagtatcaggccctcatgggcggccttccggccgaacggcccagcaatgagctctttctccgccggctggcccggcggattttggagtggtagcgccacgtttcccctgaaatcggacaggcactctgctatactgtagccagaaattggaaactacagtgagcgaggagcgagcgacatgggcgtatggcatacatacagcaccagacagaccctgtctgagctggaaacggacaagtcccgggggctgagcggggcggaggcggagcggcggctggcccgctgggggcccaaccggctggaggaggggaggcggcaggggctgctgctgcgcttcctggggcagatgaaggaccccatgatcctggtgctgctggccgcggcggccctgtccctgtgggccagcggcggcgaggactggctggatgcggccatcatcctggtcatcgtggtggtgaacgcctgtatctccatctcccaggaggacagc

SEQ ID NO: 13527 - DNA, 1095 bp, Unknown
  gut microbiota DNA sequence
ccgcctcattgggaaacaccacaaacgcccggtccgaaaggaccgggcgtttgtgggaagaaggagacaatacaaaaggggaccgggccccggcctgccgactggcaggcatgtccggcggccttctgtacaggggtagcgatggaaacggaggtcagcggcccccttcggggccccggcctcggctttccgccttggacctttcagcggcctcgcgccgcctctctggaaaaccgtgccggcccggccgggccggcacggaatggatcagaactggctctcagatcactccacgtccatgtccggcttgttgaactcgccgaacagctcctcgttgctgggcatatcctcgggcagaggacgggccacccaggtggtgttcatgtagtgcttcaggcagatgttctcggacacgatgttgccgccccaggtgccgcaccccatggaagacgtgggaggcatgccgttggtggaagaaccggagttgccgcggttgttgggctggcgcaccatgatgcgggacacgggggcgcacatgcccagacgatggatgtggtcgtcgtcgaaggagtagatgccgcagctgtggcccttgccgcccacgttgaacatggcctgcatcatggtcagtgcgttctcaaactccccgtagtacttgaacagggtcagcagagtggtcagcttctcgctggagaagaagtgctccttgcccacgttctcgatgccgccgccggtcacagcgatgaacttccggtcagccgggatctcgaacccagcggcctccgccagcttctgcgggctgatggccacggtgttgggcagacggtgcccagcctcgtcccacatgacggccttcagcttctcagcctcttcctcgttggccaggtaagcgccctccttcaccagggcggctacgaacccgtcgtacacgtcctcgtggatgatcaggttgccgtcgcaggagcagccggagccgaagtcggagcacttggagatccgggtgttcatggcagcctcagcctgacgctcggcggtgttgcaggtgttgtcgatgatgacagtcgcgttgccggcgccggagccgtaggccggcac

SEQ ID NO: 13528 - DNA, 11718 bp, Unknown
  gut microbiota DNA sequence
cgagggaaccgggcgcacactgtgcgcccctactcccgtcggagcggttccccggatcatcaaagcaatgaaagagacggtcaccaaatgtgccaggtctcccgtctggcaaaagggctatcacgaccacatcgtccgcggtgaggcggactatctccgcatttggaactacatcgacacgaatcctgccaagtggcgggaggactgttactactgccagaatgagggagtgtagttactgtggaacacacctatctgctccgtcccggccgctggcgggcggaagggacctactacgacgagacgggccgctcctttcccctggccggggagacagagctggtccaggagggggcggagcggcatctggacggctggatggaggtgtccgggcccgctccggtccgattcacgaaccgctatgtcatccgggagacggaccgcccctttaccctgacctggcagtccttcaacccggtgctgggcgtgctggagggtactttcgagctggcgggagagagtatcctgtcccgctatgtctcacgggaccgggtgtgctccggctgtgaggtgctgaccctccaggcggacggcagctatcacaacgcgggcgtgtctatgaagaacggacggcgtatgtccgcctggaccgccgtgctgagcgaggagaggggaaggacataatggctaaggtaaaagaggaaaaaaccaacgttatgcgggtcctggaccagaagaagattccctacaccccccacgcctatccccacggggacggcgaggcccccgacggggtgacggtggcccgctccctggggcaggacccggagcgggtcttcaagacgctggtgacccggggggcatccgggggatactacgtctttgacatcccggtgacggacacgctggacctgaaaaaagcggctaaggcggtgggggagaagtccatcgccatgctccacagcagggagctgctccccctgaccggctatgtccacggggggtgctcccccatcggcatgaagaagcagttccccaccgtcttccatgagacggcggagatcctggacaccatcatggtctccgccggaaagatcggcttccaggtggagctgtccccagcggacctgatcgagctggtgggcgggaccacggcggacgtgacagtgtgaggaaaagaaactgatatacccagatgttctgcaatcggccggctgtgaccgctttgtgaggaggggataagatggagcagcaggaaaagccgcccaagtttctctatctcccagaggtcaagaatgaccatttcatcatcggcggggcggatgaccgccccgatgcgtccgtaccgggatcagagccggggccgggacctgaggagcccacgggtatctacccctgcccgtgctgcgggtatctgacctttcccgcccccaaagaggaggccatagcctacatctgcccggtgtgcttctgggaaaacgacgtgttcgacccgggggaggacgatcccagcgatgagaaccgcggcctgaccctccgacagggccgggaaaactaccggcgctggggcgcggtccgccccgacctggttgtccacgcccgaccgcccaggccggaggagcggccgaaagaaatgccggcctcccggcttacggcttctcctggaactgggacagctcccgggagagggaaagccccaggtccaggcccagcgtgaaggcgtgttgggcctggaaggaggctaagatctccatgctgtcagtgagatggaagagcagatcctggtcggcctaggaacaggagcggaccttctcctgggcctgctccagccgctccagaagcccgtcctctgtgggggagcggggctcataggggaatttttggatgaccagctcatagagcagggaaagtgtgtcatacatagagtaccacccaaaagtaataatttaattatgactaaattataggcgaatttagaattggtgtcaagagggagattggcaggatggaaaagatcatgctgcccctggggcggcggctgaaagaactgcggaaagaaagaaaactcaaacaaaaggaaatggcccggtttttggaatgtacagaccgaaattatcagaaaatggagtacggagagattaacgttcccggactgacactgatcaaactggcggacttctttcaggtcagcctggactacctggtgggccgcagcgacgaccgggagcagtaaaaacgatccccgccccccccccccgccgggcgggaagagcagggaaaagccggggggctgatcttggcgggcgtgtgcctgatcctctgtagaatgaacattcaagccatttcccagtcaaacctcgaccccagtgtcatctgcctgcgcatacaggcgttaccaaaggagaaaccaaaatgcacagtcatatttttgtcaagggcgcccgggtgaacaacctgaaaaacattgatgtggacatcccgcgggacaagctggtggtcctcaccgggctgtccggttcgggaaaatcctccctggccttcgacaccatctatgccgagggacagcggcggtatgtggagtccctcagctcctacgcccgcatgttcctgggccagatggagaagcccgacgtggactatatcgacgggctctcacccgccatctctatcgaccagaagaccaccagcaagaacccccgctccactgtgggcaccgtgacggagatctatgactacctccgtctgctgtgggcccgggtgggcaccccccactgccccatctgcggcaaggagatcaaacagcagaccatcgaccagatcatcgatcaggtgatggcgctgcccgaggccacccgcatccagatcatggccccggtgatccggggcaagaagggggagcacgccaagatcttcgaggacgcccgcaagtcgggctatgtccgctgccgggtggatggcatcgcctatgatctcagcgaggagatcaagctggaaaagaacaagaagcacgacattgagatcgtggtggaccgtctggtgatccgggaggacatcgcccgccgtctcacagattcggtggagaccgccgcctccctggcgggggggctggtgatcgtcaacgtggtgggggaggaccgggatatcctgttttcccagaactacgcctgcgaggactgcggcgtctccatcgaggagctcaccccccgcatgttctccttcaacaaccccttcggcgcctgccccacctgcaccggcctgggcagccagatgaagatcgacccggagcgcatcatccccaataaaaacctgtccatcatcgagggggccattaccgcctccggctggagcagcatcaagtcggacggcatctcccggatgtactttgacgccctggccaagcggtacaaattcaagctgaacaccccggtgaaggacctgcctccggaggcgctggacgccatcctctacggcaccaacggggagaagctgaccctctactacgaccagccccgggggaaggggaccctgtatcaggcgtttgagggtattgtcaacaacctggagcgccgctaccgggaaactcagtccgactctgtaaagcgcgagctggaggagtgcatgagcgagtgcccgtgtcccacctgtaagggccgccgcctgcgcaaggagtctctggcggtcaccgtgggggggatcgatatcgacgccttcacccacaaatcagtggacgacgccctggagttcgtggatcagctgaccctgactgagacccagatgcgcatcgcccagcggatcctgaaggagatccgggagcggctgggcttcctgcggtcggtggggctccagtacctgaccctgtcccgcagcgccgccagcctgtccggcggcgagagccagcgcatccggctggccacccaaatcggctcctctctgatgggagtgctgtatattctggacgagccctccatcggcctgcaccagcgggacaatgacatgctgctggagactatgaagcacctgcgggacctgggcaacaccctgctggtggtggagcacgatgaggacaccatgcgggccgccgactatatcgtggacgtgggccccggggccggcgtccacggcggacagatcgtggcctgcggcacagcggaggagatcatgaacacccccggctccctcaccggcgactacctctccgggcggcggaagatcccggtgccggagcagcgccggaaggggaacggaaagtacctgaaggtgctgggggcggcggagaacaatctgcgccacatcgacgtgtccttccctctggggaccttcactgcggtgaccggcgtgtcgggcagcggaaagtcctccctggtcaacgagatcctctataaccggctggcctgcgacctgaaccgggccaagactcggccgggcagacacgacggcctggagggggaggagttcctggacaaggtcatcaacatcgaccagtcccccatcgggcgcacgccccggtccaatccggccacctacaccgggctgttcaacgacatccgggacctgttcgcctccacccaggacgctaaaagccggggctacggcccgggccgcttctccttcaatgtgcggggcggccggtgcgaggcatgtcagggggacggcctgctgaagatcgagatgcacttcctgccggacatctacgtcccctgcgaggtgtgcaagggcaagcggtacaaccgtgagaccctggaggtgcggtataaggggaaaaatatctatgaggttctggagatgacagtggaggaggccctccccttcttcgagaacctgccccggatctacgggcggctcaagaccctgatggatgtggggctgagctatatcaagctggggcagccctccaccgagctgtccggcggcgaggcccagcgggtcaagctggccaccgagctgtccaagcgctccaccggccagaccatctatatcctggatgagcccaccaccggcctgcacagctatgatgtccaccggctcatcgaggtgctccagcgtctggtggaggcgggcaacaccgtggtggtcatcgagcacaacctggatgtcatcaagaccgccgaccatgtcatcgacctgggccccgaggggggcgacggcggcggcaccatcgtctgcacgggcacgccggaggaagtggccgcctgtgagcggagctacaccgggcggtatctgaaaaagatgctggagcggtgagggcgcgtccttctgcctgggccagatcaacagaacggacaggccgcgggtccctgcgtgagaatcggaaataaatgcgcccccgcagagccggatgcccccatcgggccggacggccccctatatacccatcataatatataacgcgcggagcgctccggcggcctttgccggagcgccgcagaaaatcaggaggaggatcctatggaacacatccgaatcatcgccccgggcgatcctggcttcgactggctctatgacctctatatgcagagctttcccgtccacgagcagcgccttcgggaacggcaggagggggtgctgggccatccggagtaccactgcgacctgctctgtcagggggagacacgggtggggctgttgatgtggtgggccgggcccggcttccgctatgtggagcatttcgccatcgccccgcagctgcggggccagagctggggcagccgggcactgcgtgagttcctggcggagggagacccggtggtgctggagatcgatcctccggaggacccggtatcccggcgcaggaagggcttttacgaggggctgggccttgtctccaacccatggccccacatccatcccccttaccgcctggagttctccggccacgccctggaggtgatgaccttccccggcggctgggacgagggacagtaccggcgctttgcccgatatctggacgagacggtcatggcagaccgccctcagaaggtggcgggggcgtaagtggtccatcctccaggtcccgggccagcgccagtcctgtccgtagtcccagacggaagctgcggagggcgtaaaagcggttgagctcttccagctgttgctggagaaaggggtccagcacgcttcggagcaggtcggcccggcaggcagtcccgaaatctgggggctgagaggaaagggtagttttgatatagtgctcatagaaccaagatagaaagtcttccatatcaaatcagtgtccttcaaacacatcatattgcgatgttattataatacatcatttaataatgtgttaagaggagattaaaaatgacagaagtgatccttccggggctggcgggccggctgaagccgctgcgaaacgaaaaaaagatgacccagaaagagatggccgctctgctggactgcacagagggacattatcaaaagatcgagtatggaaagatcaatctctctgccctccagctgatggagctggccgactttttcggcgtcaccaccgattatttgctgggccgggattgacggatggaccggtatcgtgtaaattggttatcagcttgccgcggcgcggcaaaatacggatttgacaggagaccagaatggatctttttcagtggctgaccgacactacagaggggaaatgcctgttcaccaccctggtgtctatgatccccatcatcgagctgagagggggcatccccttcggcgtggccctgggcctgccctactggctggcctttcccgccgcggtgatcgggaacgtgatccccgcccccttcattatcgtgtacatccgccgcatcttcgcctggatgcgcagacatctgccccgcctgaacagcatggtggacaagctggaggagaaggcccacctgaagggacagaaggtgcggcgctaccagtatctgggcctttggatctttgtggcaattcccctgcccggaaccggcgcatggaccggctctctggtggccgcctttctgaacatgcggctgaaacaggccctgcccgctgtggtgctgggggtgatgacggcggggtgcatcatgactgctctgacccacgtgggtatcaatctgttcgcctgaaccccggcggcgcttccggcataggatgggccggaggtgagcctgtatggaatatgtgtgggagatcgtgctgaccgtcctgtgcctgatggggctgggcctgctggtctggtgcctgatggggcggctggtgtgcccggtccccgggcaggaggtcctggccgtcctggaggggcagggggacggaggggggctggagcagagcgtccgcgccctgatgtggctgaggagcctgggcctgctgcgctgcccggtggtcatcgtagacctgggtctggaccgggagggcctggcggtggcccagcggctcgccctgcgctggccggtggtggacctgtaccgcccggaggatggggcggaggcacattgatacaagagaggaggtgcccaaaattggaggacggcagagagctggaactggtggagggcaccgtggcctctttgatctttcagaatgaggagaacggctacaccatcctccggctggagcgggggggcgaggagctcaccctggtgggggagatgcccggcgtctcccccggggagtacctgtcggtgcaggggcgctgggtgcgccacgccacctacggcgcccagtttaaggcggagatcgtggagcgccgcctgccccagagcctgaaggaggtcttccactacctggcctccggcgcagtgaagggggtgggcaaatccactgcccgccgcttggtggaggagttcggagaggacgccctccgggtgatggaggaggagccggagaagctggcctccatcaaggggatcacccccaagcgggcccggcagatcagcgagtccttccgccagcagatggggatgcggaggctgatggagtttttgggggaacaccaactcccgctgaccctggggaccgccctgtaccgggcctatggggatgtggcactggaggtgctgcgctccaacccctatctgatcgtgggggaggagttcggtgtagagttttcccaggcggatcagctggccctgtctctgggggtggggggggaggacccccagcgcctggaggcggggctgctctttgaactggcccacaacctgaacaatggacacagcttcttgccccggcgcaagctgatagaggccaccgccatcctgctggacgtgtccggcggcctgctggagccctgcctggaggccctggccggccggggcgaggtggtctgcgaggcagtggcgggggaggatggggtatatctgcccgccctttacgatgcggagtgctatgtggcctggcgcgtcggggagatgagccggtccgagctgctcccgccggacgacctggacaagctgatcgcccgaatccagcgggaccagggaatccgttacgcaccccagcagcgggaggcggtggagctggcagcctgccggcaggtcatgctcctcaccggggggccgggtaccggtaagaccacctccctgcggggggtgctggccctgttcgagaccctggggctggagaccgccctggcggcccccactggccgggcggccaagcggctgggggagctgtgcggtacggaggcatccaccatccaccgcctgctggagaccggctttgacccccacagtgggcgtctggtcttcagccacggggaggacgaccctctgaaggcggacgccgtcatcgtggacgagacctccatggtggatgtgcctctgatggcggcgctgctggccgccctgcgcaatgactgccggctggtgctggtgggagacccggaccagctgccctccgtggggccggggaatctgttcggggacctgatccgcagcgggactgtgcccaccgtgcggctcacccagatcttccggcaggcggctcagagcgccatcgtccgcaacgcacacctggtgaacgcgggggagatgcccgacctgcggaagaacgataacgacttctttttcctctcccgccgggaccctcagagcgcggcggagaccatcgtggacctgtgccgccggcgcctgccggaacggatggggatcccggcggaccagatccaggtgctctcccccaccaggaggcgggggacgggcacctccgccctgaaccaggccctccaggcggcgctgaatccgccctcggaggagaagggggagcggcgcttcggcgacaccctcttccgggagggggaccgggtgatgcaggtgaaaaacaactacgacatcctctggagggaggacgggggcgcggcctccgggatgggggtgttcaacggagacatcggccgcatccagtccatcgacccgcggggggagtgcatcaccgtggactttgaggggcggatcgtagagtattccccggacatgctgggagagctggagcctgcctatgccgtcacggtccacaaggcccagggcagcgaataccgggcggtgatcctggctgccctggatggggcccccatgctgctcacccggggcgtgttgtacacggccatcacccgagcccgcagcctgttcattgtggtgggggaggagagcgtggtggcccgcatggtggctaacaaccgccagacccgccggtacagcggcctgcgggcccgcctggcgggggagacagcgtcgctccccctgtgactgaaaagcgccagcctgccaagtacggcaggctggcgcttttccccgagagaatggatgctcatttccggcggaggaacaggatgcgggcggcctccgccaggaggaccaggctgccggcggccaggcataccctggccgtcgcggcacggccctcctgagccaggggcacggccttggcgatgagtccggcgccggtgagcagggagagggccccgcccatgagccgcaccgggcggtgctcccaggcccggttcatggagcggtcaaatctgccggcagccccttccaccagctgttccagtctttcttccgtcatagggatacctccttatacattcgttctgattgtatgtatatttgcaaaatcaaatgccccagggggcatctgatggaagctaggtccgttcctccccgtacagcacagcgcccatggcggagaaagcagcggagacctggtcgttgatcagggggaggccgatgctctccagcatggtgctcacacaggcaaccttgcgctgaaaatcggggcccgtggacgaaaagaccagagggctgagcaggaggttggtaaagacggccacaacctctgccgcgatttgaggcgagtccacagtgatggagccgtccgacaccccttcctccagaaaggtgcgggtcatagggacgacggaggttcggcagctgagcaggtaggcacagaccagcttggggctttggtaaaaggtccgggagagcatgcggtacatctggagctgctcccggttggagacggaggcaatgatgagccgctgtaatttctccaacccgttccgggaggtgtcctcctggatctcacggcaggggaccgtctcatggaacatataggtggtgacggcgtccagcatctcctccttaccgtggaagtggtggtagatggctcccctggtcaggccgcaggcttctgcgatgtcctgcaaggtgacatgctcatagccgtgctccagaaacagccgcttagcggtgtccaaaatggccttttccgtcacttccgggtacttattccgcggcatggtttgtgcctcctaatagatacataatgtatgtatctgtagaatagcacagaacgatcctgctgtcaaccccctggcgcgaagctgaaaaaactcccggccattccatggccgggaggatccggtgtttcagggagggtcacaggggagcgaccacggaatacatcaggataaagtgagacacgctgcccaggacgataaagacgtggaagatctcgtggcagccaaagcgggggttgttccggccgggccacttgaccgcgtagagcaccccgcccacggtgtagagcactccgccggcgatcagccagaacatgcccgcggcgggcaggacgcgggagagaggggcgatggcgaacagagccatccagcccatggccaggtaaatgacgctggtgagccagcgggggatgtccagcttggcgatggtgaggatgatccccgccgccgcacacagccagatggccagcagcagggggccgcccacgccgccccagaggacggtcatgcagataggggtgtagctgccggcgatcagcaggtagatggagcagtggtcatatttccgcagggccagccggccccggactgtggtgttgacgcagtggtacagagtagaggcggtgtagaggccgatcatagacagcccatagaccaggaaggcggaaaatttgatccagtcctccagcccggcggcccggaccagaagaaataccgtgcccaccagggccagcaccgcgcctgccccgtgggtgatagcggaccaaggccgcaggccgtcataggggtcccggcggggtctgggagcctgctgatggcgggcggtgagcggggcggagcgggtgatatccggtaccacagagggattataagcaggttcgtgcatagagggctcctttccaggaaggcacatctgttcttgtgtatcattagtataacaccaaacagacaaaatatcaatataa

SEQ ID NO: 13529 - DNA, 1016 bp, Unknown
  gut microbiota DNA sequence
tgcgccagccactccggtttccggggcttggtgatccgcagatccattcccggcttgcttttccagaactgttttgccgcttttgccgccgtttccggcaggctggtcatccagaaccagcgaagttccggcatctgttccggggtggggatgtcgtccgccccgaaaccgaacaggtcgaaggtggagaggttcgtcatttcccggaaccctcgcacagcggagaagttccccaggtttcccggcgcaccccagagcctcagttccttcaggtggggatggacagcagccagcccggtgagatcaaagtccttcagctcgatgccatgcagcccctgtaggttcggcagttccgtgtgcgggcggtattccccgataaattggagggtcaaaccgccgccatcttcgggggcatggatggcacaggcgtccggccccttgttctggaacaggagctgctccgttccctcacacagccatagctcctccagcccggtcatgtccagcatcagctttctgatgctggtgcctcgcagatcaagtgtcctctgaccgtggttcagcaaagtcacttcatcaacaaaggggttttcccgcaaaaactccagcagatccgggtgccaccgctcacagataagggtggagaggcaaggcagcgactttagttccagcgccgaatcgaatggtgcgtactggtccatcacccgatggttgttgaccttcagctggataccgccgatctccgtcacctcgtcgctctccatggcctccttgaaggcccgccgccgttcctccagaatggcctgccaccggatctggagatacacatcatagccgtcactccagcctccgtaggaacggcagggctggtcggtgaagggcggaagtgtgcccaccggtttatattggggcgggacctccaacggcacccgcagcaggtggaggtcacgggaccagtacatgaagtccttgtagagcgggcggagatggggcagttcctccgcagtcagaggggc

SEQ ID NO: 13530 - DNA, 13590 bp, Unknown
  gut microbiota DNA sequence
cgatggctcggccccccgcttctgttccattttcagctgcggccgcagagatcagccggtctgctgctcctttttctccagggtgatcccgcccacgcccacgttgactgcggccaccgtcaggccggtcatggactccacgctgctcttcaccgcgtcctgcacggcccgtcccacctcggggatggtgtgtccataggacatcagcaccgccagttccaccgtgacctgctcgtcctccacctggatatggactcccttggtcaggttcttcttgttgctcagcagctccgcgatgtcgctgcccaggttggcactcagcccgctgactccctccacctccaaagcggcggcggcagcgatgctggccaggacctccccggaaatatggatattgcccagctcgtcagagcgggagacgtactctctattctcactcacggatggtcacgctccttcacgtcacagtttccgcgtctgcggagatcttgttcactattgtaccacagcagaggcgctttgacaactgaaacctcaaaaagtcccttttgccttttgaagtggttttggatataaatgacctcccaccgtcaaaatcacggaagaagatatgtccacagatagctgctgctcaataaatttgaaaatttcatgggcaatactctaaatttcaaatatcagaatggcttgatctgttccgactgtcgacatggctgccaatttatatgtacccttcttcatcatttcttccgcctttttttcgatagcctttgccaggtcttctgtaccggtagaacattccacgacaactgatttgtaaaacatcagatctaccctctctcacaagttaaatttcttattctttcgattatgctgcaatacgcgggatgaaaaacaaatttttcttattttatcatgtctctctgcttcaatcaacacatagcgagatctatagagacatctcacccagcagaaatcagataagaaagaagaggggagcagcgctcccctcttctttcttatcctgttttcccgcgcgtctctactccacctcaatgatcttgatctggctggcggtaaagccggccacctctgtgacgatgtccacgatgcgggcggtgtccgcctccgtgatgccgccctccggcgcggccaccgccaggctgacgctctcgtccccgatgaaggccacgcagtccgtatagcccttggccactaccaggttctcgatctgggcctcggtgacggtgtagtccgccatggcctggatggtgtcgttggcctggtccttcatggtctggtctgcatcctccccggcagccgcctcttggagcagggtcagggcgctgtcccgggcctgctggcggttgaggcgggcagtggcgaagtagctgttagaggaggaggacgtctgccccgcctcacccgtgcccgctgtcgggtcctcctgtccggcagtgccggaggcccccaccagcgggtcctccgtctgtccgtccaccatggtggactcccccagggtctttcccgccgccgtctcctgctcgtagttccagttcagatagaccgccgcacacacgaacaaggcgatggcggccaccaccgcgttccgcttccagagctgagacaggctcacgccctttccctttgtcttcatacccatgtcctcctcaaattcaaaattttaatttccttcacagatggagatgcggtcgctgcccaggccggtgagggccgagaccgcctccagcagccgcagctggaccgccgggtcgcccccgccgggacagaccaccagcgccccctgaaactggggcgtcagggtgtagaggggcaccaccccctccgtccccgccccctgtcccaccgtgacggcggaggcggaggatcgctccccgtcccgctccacgttctgggccaggatctggcggctgccgctcttcagggtcagcaccacccgggtctttcccgccccctggatatcggagagcacctgagacagcttctcctcaaacaactccaggtcgaacggaccttccccctccggcgggccctgggcctcctcgctccccccggacggacccatgggcagcatcatcagcagcacccccgccgccatcaccagcagtacatactgataccgtttcagcgcccccttccaacgctcccgcagctggggccagatctctttcacggcgactcctcccttatgtattcctgccgctgcgccgggatgtccagatcactctggatctcccggacaagctgttcctgttcttcctgggccaggtcccccgtcacgctgcacctccaggggaggaacacccccgcctcttcctgggtgcaggtcacccggacctgacaggtgatcccaagctccgccgccttgtccataacatatgcggcacactgctcctctatgaccagcttcatccagtcatttgtatctgtcctcagccggtccgcctgttcctcgatctgggccgaatacccggacagcccgccctccgccggcagggtgagttccgccgccggacggaacaccgccgccagcagcaccagtccgcacaccagccgccccacccgcttgggtccgccctcctgcatcagcccttcggccagggctgccaggatggccgctgccgtcactcccagcagccactcccgggccgcatccatcatggtgtcaccgcctttaccgccgaggccagactgaccagcagcatcagggcgcaggctccggtcatgcccagcacgatgccgaaggccccgccgatactgtccagaaggtcggacagccgcttgtcagacaccgtcccgatcagcgccgccgccagcttataggtgaggtagtgaaatgccagctgaaggaaggggatcaggcagatggccaggacccccagcatccccacgatccccaccgtcccccgcagcacgccggcccccaccagcacggtctccgccgcgtcggccaggatgcctcctaccaccgggacggcccgagagatggccattttggctgtcttgatcgcggcggcgtcggccgagccggcgatggccccgctggcggtgagatagcccacaaaggccagcaggacggcggtgagcagggatgtgaccacccatttcagcaccgacgccagctttttcaacccctcgttccccaccgccgcgtgggcggcgcacaccgccacataggcgtagacgatgggcaccagcagggtgtcgatggctccgatgagcaggtcggagaacagcacggtggccccctgccgcaccgccgccccggtggccgctccggtggctgcggtcagcaccgccaccaccggcagcagcagcccggcaaagccgtccatctgctctatggtctgccgccccagaccgatcatggtctgcatgtcgctcaccgacagggcggtcaccgccaaggtgcctgccatctgcaccgcctggaggcccccctcccgctttccggcgtacaccccctccgccagaccgcagaacaccgccaccgccagcagcttcagcccggtctgggcgctgcggcgcagcagctcccccgcctgtcccagggcctgttccgccaggccggacaggccgccgctcaaatccccgtccggctccacgccgtaggattccgccgcctgccacagctcgtccagcccctccacctgctccggctcccccgccgccctgcagggcatcgccagcaggagcatcaccgccaccactgtcaaaacctgtttcatcccagcaactccgccatcatcgtcagcactccctccgccagcgggagggccaccgccagggccaggatggtcccggccacctccacaaaggccgctgcgcccccctccccggcggcccggcacacctcccccgtcaccttggtcaggatggagatggccgccgttttcagcaccggctccaccagggtgctgtccagccccgcccgcccggccagtcggccgatggcctccaccaccgaacccagggcgccggcggccagcatcagcatccagcaccccgccgccagcaccagcaccagcgccgcctccggcgcgccccgccggatcactgcggcgcacagcactgctgtcaccgccagagcggcgatctgcatgatcccctccattacaggtggaacagggtcttgaccatggtgaacagctgggcgatctcctgcaccaccatcatcagcaccaccaccagccccgccagggtggtcatcatggcctgctcgtccctcccggcccggctcagcacctggttgagcaccgcgaccaggatgccgatggccgcgatcttaaaaatcaaatccacatccaacgtcagatccctcttttccgctcctcagtaactgtaccgacttgtcccggttttttccgtcggaactccgggccggcggcagattctccactttttacaaaaggaggatgaccagaaaggcccccgctgtcacccccagggccccgtacacctttcccagccggagacgctcctccccggcccgggcccgcagtccctccagctcccgccgggccccggcgatggccgcctgctgtccccgcccgtcatagcgccccagcacctcccccagggggtacagggcccgcttcgcctccggtgagacgggaagctggtcggtgagccgccgccaggcgtgggcaaaggtctcccgctccagtccgtccagcgcccgccggcatgcggagaacaggcgccgggcgggctcctccgtccggtgagccagctcctccatcagctggggcagcggggtcagccgcagggccagctcccgctccatcagctccagtccggcgcacagggcccccagggcccgctcccggtgggccagctccgccgcagcgctcattcccagccagaccgggcccgccgccaggcagaccgcgccaagcatccggatcattccagcacctccacttcatagatcctccggcccgcctccctgcggatgcggaccagccgccggaagactccctcctccagcagcccccggtacagcttccgccgggacaggtcctcccgtcccgccccgtgggcggtggccagcagtgtcacgccgcagcccgccgcggacaccagcgccgccacgtcctccggcgcggtgatctcgtccaccgccagcacctgggggttcatcccccgaagcagggtcatcagcccccacgccttgggacacccctccatcacatcggtgcgggggcccacgtccagctgggggaccccgtcgaacagcgccgcgatctccccccgctcgtcggccacccccacccgccggggaggcgccccctccccggcggagacggcccgcaccagatcccgcaggagggtggtcttgcccagccccggaggggccaggatcagggcgctctccagccgcccgccctctaacagcgacggcagcacctcctccgccgccccggggaactgccgcgccacccgcaccgcagcggaggacagcttccggatggtccgcactgccccgtcctccagggccaccgtgccgcacagccccacccggtgtcccccctggacggtcaggtacccccggctgagctggtccagcacggcgtggacagaggcccggctggccagttccagcagctgctccagctcctgctgggtcacggggggcccggccagtgccctctccccctccggcagcactgccgccatagggagccccacccgcagccgcagctcctcgatctggctccgccggtcctccggcagggacatcaccccgctccgcaggcgcaggggcaggacccgcgccgcctgctccacgccggattctctctgcgtcatcagcctgtccacctccgtttgactcatcctatgaggacaggcccccgcctattcctcctttttgtgtgatatttttcgcacatctctcttgacatctctccagggatgtgatatatttcactcacaacatgtgagaaatatctctcatctcagaaaggagcctctctatgcggcacccgttcaactatctgtctctgctctcactccccgccctggccgccctgatctatttccccaccggggacgcggattttctcggctttctcggctttttggtctttctgcgctacctgtgggtcaacccggacgagctcttcctgctcaccctgcgccgggcggccaccagcgccttcctggctgagtgcgtgctcctggctccgctgctgctcctcttttacctcctggagcccggctccagtcccatgccccaggccctgggcctcagcttcgccctctccctgatcttcttctgcctgttccacacctggctggagtggaaggaaagcagggactgcgcatgagcctgcgcaccaagatccgggagctccgcctccgggaccggctcagccaggaggagctggcccagcgggtgggcgtgcggcgggagaccatcggccacctggaaaatggacactacaacccctccctgaagctggccatggacatcgcccatgtctttgggtgcactgtggaggatatcttcttctttgaggactgacccaatcggccctctcccgcccccggagacgcccgccaaaaatttttcaagtttttttcaaaaagggcttgcattattttgacaggtgtggtaatatacaaaagctgtccggtgagttcacttcggaccgcggctttccgggtgtggcgaagtttggtatcgcgcttgaatggggttcaagaggccctgagttcgaatctcagcactcggaccaaacaatgataatccgaactacattatccaagtgggtaatgtagttcggatttatcatttctattgaaaatgtgctttgatggacaagggcaggattgttttcctgcccttgccttttttatgaaatccatatataattatataaaccgaataaaggtggtgtgttatatgagaaaatcatggtggaaaattcctctatattgtatagttgcaagttggatatgctttcaactggaagttcgttttttggtaagatggacaatagtaacattgccagacgggtcaatatctacagatagtacacgacggttaattcttaatattgtgctatttataattgttgttgcaattggtggatttttcttttttcgtaaaatgactcacaaagaacttttttgctctgcgtctgttttggttgtactcaatattgtatttggcttaattgcttataaaatgcaaggaatgttttctttttattttgccgagttaacagagtgggatagtcttatttcaagcctgctattccaagttactcaaaatgtttggatttctgctgtaatcaactggatattgcctccatatatttttgttctatttgggaaaaaagcatctaacgagagttaataaaaaggcgggagcatcgtttcagatgttcccgccctgtgctttagtcctgttttgacttttcttgttcctgctgtgctttccgctctgccaactcccgcccttgcccttttcgctgttctatgctatatttcactcacaatatttcatttcaaagggaaactgctatggattatgaatttcagctctctccatatgatggatcatctcttgttccacaagtcagttgtgcattagaaaaaaggactgaatccatctcaagagaaaaatacccgaagatgtggaaaatcaccgatcattttaactcaaaaaaagtttctgaaattgttttaaaaagacggcgcttgcgatacagggtatatggtattttacttatcattatgggagcatttttgcttatcccgggattaatggagccgcaagaattggcagtccctttatttgcgggtattttgggccttttgctcggtgtgtttactctatggagcagtaaagcccaaaagctacaaagcgagcgttttaatcaagccgcagtaaaacttttgaagggtttagaggctcctccccctgttcgtgttcagttcacgcaaggcggaatgaaaattgcagaccagcagacagttccatattctgattttaattttatatatgaaacaaaagatttatttcttttgacatggaatgaacaggtaactattttgcaaaagaaagacatggtctcaggtaataaagatcaattcatttcttttctgcaagaccatattagaccataaaagtatcatatcacaaaacggaggtcaatatgaagcgaaacccagccattgcaatcataatgtgtctgcttgtatcattcacattttctgcctgcgcgcctgcggcccccagcggccaaacgcctgaattttttcatgacattggaaaaacactgagtgaattaaaaaaagagcatcctgaaggcgaattgattgtaagattagatggatctccggatagcgctgctatatgttttggggaccccgaggcggaatatctttactacttttttggaacacagagcggtgatgctgaaaaggctatgaacgaatgtgaagaccagctgaaatgcgccggttttgtcaccaccgcaagcatactctttccagacatggaagatgacatgccctttgaagatttcttttccttgatcggtgtggacgactatgagtacttgttgggaccagaggtaataactggagagggctggttaagattcacgtatcatgatatggaagtcatggtgaatacaaacgaagccgctcctggcggcggatgggatttcacaggagcagagatcgtgaagcgtgatgctccggtatctattgcagacccagaactatcaaatgccaatcaagacttagcggatgcggtcatgttcgatcaaactgtgtcatgagaacgcaatactgcatccggcgtgtgcatttatttttgaaggatcgtcgtaaagagaacgatgactgaatcagtaaaaaaggcgggaacatcatttcagatgttcccgcctttttcacaccgcatctatccgttctgctccctgtcctgcggcgggcagaagaagggccgcgcctcgtcaaacaggtcgatcatgccgcagtagttgaacgtctcatacttccacagccattcctgctgctcctcgttcagctccgactccgtcagcgtctggccgtccgcggtgatcaggcccaccggcgtgatcaccggcagctcctggtacatctgggccaggaagttcatgtagcccgtcaggggcaggccggctgtctgagcggtgagcacccccagatagttggggctgaggatcacgccactctgctccgggatgtcgtagttggcccataagaagaaggggacggcgtactgctgcagcacctccgccgtggtgcgctccgacagctttttcccgtagagctcctcgtagaaggcatttttcaggggcggctggtgatccccgaaaaagacgatcagggtgggctcctccacctggctgtaatagccgatcagttcctccagcgcgtcgtcgctggcctgggccagtgcgatatactgctcggcactgctgtccgccgtgcgcagctgggtggacagccggatggtcttggtcaggttgttccatccctgggcatatccgctgtggttctgcatggtcacattgaagacaaaggcgggagaggtggtcccggtcacgtcaaagatggtctcgtagtccgatctgtccgagatatagcggcggatcagataggggtcctccacgtcctcctgatacagctggtggtcaaagctgaggcactggtaggcgatgggccggttccagccggaggacagataggggtggaaagcggtcgtctcatagccctggctcccagccagggctgccagggagggcatgccctcctccacatacagctgataggccaccgtgtgcggcggctggaagagagtggagaagccggtgaggtactcaaactccacactggccgtgccgccgccggtgaccggggagtacatccagcccttgatggtgttctcggtcatggagtggaggaagggagtggggtcctcctccagctccagcccctcaaaaatggtcaggtccgcgaaggactcgttcatgatggcgatgatgttcaccggccgggtgacggagccgtccgcctctaccgccgggtactcctccgccagctccagcacccggtcccggctgtaatcctccggcttgtccaccgagctgtaccgcatggccaccgtgaagttcagcaggaagccgttggcctgggtgacccactgctgggtgtagatgcccagggcgggcagcatcccggtgcagaagaaggcgaagctgtaacccgcgccgaacaggatcagcagggctccggccagccggggcatccggtcccgccgccgctgggccgggcaggcccagaccaggaagaggtaggccaccagcagaacggccgcctggacgatgtagtggtccagcgagtagtcgaagtcgctggccacgttggccgcggtccgccagcccgccacatccgcagggaacaggatgcgcccccggaagcgcaggatatagtggttgagcagccccaccaggaagcacagggtgaccgccaccgccgcagatcgccgccgccgccccaggatcagctggcacagggcgaacagcaggtaataccagatcatgttcatcagcacctgccaggccgccagatcctggaacacatcgttctcattcaggatctccaccatccagagggccgcccacggccccagcaggaacaccagacgggagatccaccggtccgggtccccccgcatgcttcggaaaggacgcagcagggtatctttacagaaaagcgctctcatgtttatcctccaaaaacggcagaccaaatatgccgtatttttataggatagcgcgtccccgaaaaattgcaatagccttcatcaaattttaatgaactctgcatccttttccagggtatcctctgaaatagacgaagaaaagggaaaaaagttccaccctttttctgctattcaaatatacgcttttgtatgaatatttgtcagggggccgcctccccgtccgcggcctgcttctcagttttctcctcctgccggtgcgttcttttctggtattcgctttttcaccaaaaagacggccttatttttctcaaattcgcatatttatctattgactatgcatggaatagtggtttatactcagggtatcgccctggcttgccggggcaccaaaataaaggagatctgtttgaatgaaaaagtttcttgctttgaccttgtccctggccatggccctgagcctggccgcctgcggcggctccggaagcggctccgcttcctccgcccccgccgcttcctccggcgtgtcctcttccgccggggacgccggctccagcaccggcaacaccagcacccccgccgagctgaccaccgtggagaccggcaaactcatcatgtccaccaacgccgccttccctccctatgagatgaccgacgacagcggcaatgtggtgggcatcgacgccgagatcgccggcgccatcgctgacaagctgggcctggagctggtcattgacgacatggacttcgacgccgcccagctggcggtccagcagggtaagagcgacatctgcatggccggcctgtccgtcaccgaggaccgcctgctggtcatggacttctctgacagctacgccaccggcatccaggtcgtcatcgtgcccgagggctccgacgtcactctggacaacctgggcgagcagctcatcggcacccagcgggccaccaccggcaacatctactgcaccgacgactacggcgaggaccatgtgatcgcctatgacgacggcatcgtggccgtgcaggacctgctcaacggcaaggtggacgccgtggtcatcgacaaggcccctgcccaggagttcgtgtccgccaaccccggcctggtcattctggacaccgagtatgccaacgaggactacgccatcggcgtggccaagggcaacaccgctctggtggacgccgtgaacggcgcgctggccgagctcaccgccgacgggaccattcagtccatcattgagaagtacatccccgcggagggctgatcgtccgcacgccagatcaagaaagggcggcccctggccgcccttttttttacgaagacatagagaggggtagaacaatggacctggcctactattatgagctatggcgcgggatgatgctctccgctgacccggctgttgcagacgccgtcgcctggtggcaggaattttatgtgaagttctatatggcctttattgaggccgaccgctggaaacagtatctggacgggatcgggaccaccctcaccgccactgctctggccctggtcctgggcgtagtcctggggatcctggtggctctggtgcgcaccgcccacgaccagcagcgcgccgaccgccgcaggaacccggtcctcggcctgttcaacggggtatgcaaggtgtacgtcaccgtcatccgcggcacccccatgatggtccagctgctgatttggagctccgtggtattcgtcagcagccgcaatttcacccaaattggaatcctgggcctgggcatcaactccggagcttatgtggcggagatcatccgcggtgggctgatggcggtggacggcggtcagatggaggcgggccgctccctggggctgaattactttgataccatgcgcttcatcgtcatcccacaggccatcaaggccatcctccccgccctgggcaacgagttcatcatcctgctcaaagatacctctttgatcacggtcatcggcggcaaggagctgctccacgccgctcagggcatcatgggccgtacttacgaggcaatgttccctctgattggcatcgcctgcatgtatcttgttctggtcatgatcttcacctggcttctgggcaaactggaaaggaggctgcgtcaaagtgatcgacgttaaaaatctgagcaagtcctttggcgaccacctggtgctggacgacatcactgagtccatccaggtgggggagaaggtggtcatcatcggcccctccggctccggcaagtccaccttcctgcgctgtctcaacctgttggagacccccaccaaggggaccattaccttcaacggcacagagatcaccgatcccaaggcgaagatcgaccagatccgccagcagatggggatggtgttccagcatttcaacctgttccccaacatgaccatccgaaaaaacatcaccctcgccccggtgcgcaccaagctcttgacccaggccgaggccgacgacaccgccaccaccctgctgcgccgggtgggactggaggacaaggcggactcctaccccgcccagctctccggcgggcagaagcagcgcatcgccatcgtccgtgccctggccatgaagcccaaggtgatgctttttgacgagcccacctccgccctggacccggagatggtaggtgaggtgctggaggtcatgaagcagctggccgatgagggaatgaccatggtggtggtcacccatgagatgggcttcgcccgggaggtgggcagccgggtgctcttcatggatggcggaaagatcctggagcaggagcagccccaggccttcttctccaatcct

SEQ ID NO: 13531 - DNA, 21268 bp, Unknown
  gut microbiota DNA sequence
tccgcttgccataaaaaatccctcctgtcctgactgggcccggcagatccggacccgctcaaaaccggtgggaaagagctttttgtgagacgtttcaatacaaattatggaagtgaagcagaactatgcccatttctgccccgcctgtgcaggatgtccagggatcatggaggcggcctatcctgcgtgagaggtgccacttcccagatacacgtccccggaaatgatgtcatccaattttattccgccgcctgcgggtgcaggaactccttgcgggacggctctttccacaagctgaccgggcccgctccaaaggagcgggcccggtgtccggcctgtcttttcagtctttgaggctctcggcccaggcggcgtacttggccacctttccgtcgcactcctccttgtcggcgccgttggccaggatatagaccttgaccttgggctcggtgccggagggacggacgatcaggctggtgccgtcggccatctcatagcgcaggacgttggaaccggtgagctccatctgagacctggcgccggtcgctgtctccaccacgctgccgtccttgtagtccttctgctgctttaccgccacgccggcgatctccgccgggggctgctcccgcaggccggccatcaggtcagccatcttcttcagcccgtccaggccgggcatgaccaggttcatggtgcgctcgccatagtagccgtatttcttgaacagggcctggagggcgtcatacagggtcatgccctgggaggcataccaggccgccatctcggtcagctccaccgaggcggagacggcgtccttgtcccggacatagtcccccagcatgtagccgtaggactcctcataagagaagatgaccttccccgcaccggagctctccagttcgtccttcttctccgccaggaacttgaagccggtgaaggtgtcatagcactgcaggccgttgacctcggccaccttgcgggccatctcggtagtgacgatggtcttgagggccacgggcttgtcgggcatcttgccggtgcggcgcttggccccgatcaggtagtccagcagcagcacgccggtctggttgccggagatgaccacgaagtcgtcctccttggtacgcaccatgatgcccacccggtcggcgtccgggtcagagcccaggatgaagtccgcgccgtgctccttggccagctccaccgccagatagaacccctccgggttctccgggttgggggagaccacagtggggaaatcgccgtcgatgaccatctgctggggcacgcagatcacgtgcttcatgcccaggcgcttgagggcctcggggatcagcttatagccggtgccgtggaagggggtgtacaccatggtgaaggtgtccgccatctgctccaccaccgccttgtcgttcacctgctccatcacgttggccaggaacttctcgtccgtctccgcccccatcagcgtaatcctgccctgggccacggcctggtcatagtccatggtcttgacgcagtcgaacacgtccagctccttcatcttccgggccacctcgtcggcgtgcttggggggcagctgggcaccgtcctgccagtagaccttgtagccgttgtactccttggggttgtgactggcggtgacgttgataccggcgatgcagccgtactcccgcaccgcgaaggacagctccggggtgggacgcagggactcgaacaggcgcacggggatgccgttgcccgccatgacacaggcggcctcccgggcaaagacgtcggagttgttgcggcagtcgaagcagacggccacccccctggcggcggcctggggcccctcctccaggatgacctgggcaaaggcctgggtggcgtggcggatgacatggacattcatccggtacagccccacccccatggtgccccgcaggcccgcggtgccgaaggaaagctgatcaaaaaagcgggattcgatctccttgtcatcgccctggatggatgccagctctgccttctcggcggccgagagggccgggctgttcagccatgcatgataagcatcaagataggacatatcgtaggacctccaatcaataaaatccgctgggacatgctgttgtggacattgtaccacaggcaggcatgaatttccagcggatttttggacggatccacggtgagcatgttttcaggcccgggaccctgtcatttgtggtagctggagccctcccggatcttgaaggcccggtagagctgttccagcagcatgacccgggccaggtggtgggggaaggtcatgggggacatggacagtttgacccaggactcccccttcaggcgctccgccaggccgtaggagccgccgatgacaaaggccaggtgcttggcggagctgtgctcccaggtccccaccaaagcggacagctcctcgctggagcgcagcctgccctccacgcacaggcacaccaggctggtgctggggggcagcttggtccggatggcctggctctccttctccagggcggcgtcgatctgcgcctgagaggggtcctggggcagcttctcctcaggcagctccaccagggtgagcctgcagtagggggacaggcgcttgatgtattcggcacaggcctcctgatagaatttctccttcagcttgcccacacagatcagatagacgctcagcacagggatgcctcccttgccggaaaggcccggagagctccgccccgctccagctggtacagcgccccgcactccgaccggggggctaccgccagggtgatgtcctcctccggccgcacccccagggcggacaggcggcgggagaccacctctcgggcccgggctggggtattgttctcggaggacaggtgggccagcaagatggtccgggtcccggccagggcagcccggccggccagctcggcccccgcctcattggacaggtggccgaagtcccccaggatgcgctgcttcagggcgtagggataggggccggagcggacccagtcctcgtcgtgattggtctcacacaccagcaggtccgccccccgcgccgcatcccacacctggggggtcaggtggcccagatcggtggccaaggccatccgcgccccgccgccggtgacggcgtaacccacactgcccgcggcgtcgtggggggtggagaaggactccacccacaattcccccagctggaagccggtgccggcctccagcgtccggcccagccgcgccagtgctgggacttttcgctccaggcggtccaaagtgggggcggtggcgtaaacgggcacccccagctgcttggtcagggtggccagaccggagacgtggtcggtgtgctcgtgggtgaccagcaccgcgctgagccgggtgggatcggcacccagcgccttcagggcagaggtgatccggcgggcggagatgcccgcgtccagcaaaacataagtagagccgcagcagatcagcagggaattcccgctggagccgctggccagagtacacacttccatgtgccgcctcccggagaaagagtggcgccccccagggcgcgaaaacgggcggcggcagatcgccgccgcccggagcatgtgcaaaggtcagcctgcctgggtctgggcctcgtcgtcgggcaggaagagcacctggatcttggcccccacgccggacagcttctccaccagggtctcgtagccccgctcgatgtggtacaccccgtcgatctccgtggtgccctgggcagccagaccggcgatcaccatggctgccccggcccgcaggtcacaggcgtggaccggcgcgccggtcagggcggggaccccctcgatgacggccaccttgccgtccacctggatcttggcccccatgcggcggaactcatccacatagcggtagcggttgtcccacacgccctcggtgagcacgctggtcccctgggccaggcacaggaccgcggcgatctggggctgcatgtcagtgggaaagccgggatagggcatggtcttcacattggtgcgggtgatggggccggagcggcggaccagcaccgcgtcgtcctgctcctccacatccacccccatctccaccagcttggcgctgatgcagtccagatgcttggggatgacgttcttcaccagcagctcgcccccggcggcagccactgcggccatataggtgcccgcctcgatctggtcggggatgatggagtaggagccgccccgcaggcgctggacgccccgcaccttgatgacgtcggtgccggcgcccatgatgtcggcccccatggagttgaggaagttggccaggtccacgatatggggctccttggcggcgttctcgataacggtcatgccctccgccagggcggcggccagcatgatgttcatagtggcgcccacggagacgatgtccagatagacctgcccgccggccaggcagccccggccggggacctgggcatagatcaggccgttgcgcacgtccacctcggcccccatggccacaaagcccttgatgtgctggtcgatgggccgtccgcccagattgcacccgccgggcaggggcacctctgcccagccgaagcggcccagcagggcccccaccagataatagctggctcggatcttccgggccagctcataggggacctgacggttccgaatgtgggaacagtcgatctccaccgtggtgcggttgatggtgcgcacgtccgcccccagctcccggaggatctggaggatcagggtcacatcgctgatctggggaacattttcaatgcggcagaccccgtccaccagcagggcggcggggatgatggcgacagcggcgttcttggctccgctgatctcaatggttccatggagcggatgtccgccctcaatcaaatatttggtcaaagctgcaccctcttcaaacgtaatgaggtccttatgtctatacggcaaaatgccataagtagtccaaacaggtcccgcctgtgggcggtctgatacaactatattgtaacactattatatccaaaaggcaaataaaattacatttgcgtgaaaagtgtgtaaaatcggtccaaaggccggaaacattttcccgattcttaaacagaatccacaaagggaccatcctggctgccggaaaagcgggccctggcccgggggagcagctggtccaggctggactcctcctgccgctccagcaggtcgccgatgagctgattggacaccagaaagcccttgggcgtcagccgccaccggccgccggcctgctccgcccagccttgggcctggaactggcggagccgggtctccaggggggcaaagtccatgaaataggcgctgcggtactcccactcctcgattccctgggcggtacgcagccggagcatcaggtactcgcccccccgctcccgctgggggatgagctcctcgctgtcgatgatctccccgcccttgagcacgccgtcgatgtaccggtccaggtcccggacaaaggagtaccgccgcccgccgaagtcggagtgggcgccggggccgaagccgatatagggccgggtgagccagtagcgcagattgtgccgggactcatagcccggcttggcgaagttggagatctcatactgggggtagccggcccgctccagccggcccacggtccagaggtacaggtctgcctgctggtcgtcgtcgggcaggatctccccctccgccgcccggcgggccagaggggtgccctcctccaccttcagtccgtagcaggacaggtgctgggggatcagggacagggcgtgctccaccgtagccttccagctgtccatggtttggccgggcaggccgtagatcagatccagagagacgttgttcagcttggccttccgggcggccgccaccgcctcgtccacctgtcggacggtgtgggggcggtggacggactccagctcctgggggcagccggactgcatccccagagacaggcggttgacccccgccttccgcaggcggcgcagggcacgcaggtccacgctgtcagggtttgcctccaccgtgatctctgcgtccttctccacctgaaaaagcttgctcagggcggagagcagctcctggatgcgccgggccccgtaccagctgggggtgcccccgccgaaatagacggtgtctaccgggatgccctgggccaggggcgcagtctcccggatgtgggccagcagcgccttctgataggcgtccatccggtcctcccgccccgccagggagtagaagtcgcagtagtcgcacttgctccggcagaaggggatatggatgtaaatgcccagcttgtccgcctgtccggtctgtctctgtctcatggggccgccctccttatgatctcaaaggtattatagcggagctgagcccagttgcaaggggcaggcagaaattttgtggacccggacagggcaggcggcggaagggagggcactttttcatcaaatatgccccgccgccggggctggcatgaaagggcggtcccgccctgcggggcgggacccttttgggagcatcctgcggatggaggcgggcggggcaagctcttccctcctccgccccagaagtgctccaagatctggtccccagaaaaaagaagggcaaaatagtaaagcctgcttgacacaaaatgtaaagcgtgctatactcaagatgtaaagcaagctaaacatttttgcgtgaggaggaccgccgtgaaaaaccgcatcgctcagctccgaaaggagcggcgcatcacccaggaggagctggccgacgctgtggaggtcacccggcagaccatcatctccctggaaaacgggcgctacaacgcctcgctgctgctggcccacaagatcgccaaatatttcgggagctccattgaggagatatttctgttcgaggaggaagagacatgaagaagctgaaaccgatcctgctcgccgccgccgcgctgggcgggctggccctgatggcggcggccgccctgctggatctgcccggcgggatcaccggcctgatgtgcggcatgggcggagccctgctgggcctggggggctccagcgtgatcatgggcgccgtggagcggcacatgtccccccaggagcggaaggagctccagcgcagcgagaccgacgagcgcaacatcgccatcagggagaaggccgctcagtccagctggtactggaccctgtacctgctgtgggtcccctttgtgatctctctggtgcggggggagacgctttggatccttctctcctccgccgtaacggtcctccactgcgtcttttatatggtcaatatgggccgctgggccaaaaagctgtaaggaggaaaaatcatgctcataaaaacgaccggacggggccctgactatggaaaaaatctgatccagcgccgctgggcattccttgccctcctggcggtgggcgcgacgggcctggtgtgctatttcttcctggtgcccggcagcggcatcagcggccacgcccgaggcttttatctggggggcgccagcggcatcaccggcgccgcactggccaacctgctgcgcaacgagtggatgctccgccacccggagcggtggaaaaaggccaggattcaggagaccgacgagcgcagccagcgtctcaccgcccaggcggcccagctggcgggggtggcgacattttttctccaggccctggccgcctttgtcctggtggcagtggacccgatgctggtgaaggtgctgctgggctccatgctggcctacatcctgttcttcctcggcgcccgggccgccctggcccggcggcggtgagaactttatcctggaaaggaggaagccctgtgtcctgtccaaacccaattccacccatgacggaggaggagcgcgccgccttccggtccttcctgctccgccgctatgtcctcagcatcctggccctggtcctgggcatcgccggggcggtgctgctcctccgccggggtgttgacgggccgcccctgatggaggccgtctgggtctgcctgtttgtcctctccggcgggaccgccgtgctggggggcagggcctggggccggtatcagactctgctcacagagccggaggctatggagcggacctggcaggcccgcagagccggcccccagacggaggccgaccagtcctaccgccgtgatgtgagccggtcaggccgtctgggcctcctgctcctggccgccgccctgctgcttctgctcctgggcattccccttcaggcccaactcaccaggagggcggcggatgtgtatggccaggtgatcttctgcctgtttctggtcggcttcagcatgatggcggggagctggcacaccctcgcccggccggaggagctgcgctccgcccgggtggcccgcgacgacgagcgcagccaggagatcgagctccgggccgtgtggaaggctgcccgggctacccagaccgccctgttcctcggtctcctggcggccggatggctcggctggtcggatgtctccctgaccctgtccatcgtgctatttttctacttttccgctctggccgtcttccgcgcccggctgtccaagcggatgtgagggtggcgggatggaacagatacagaggaagacccgccgcctggagctggtcctggggccggaggatgggggcgtcaaggtggacaccctgctgcggcggaggctgcacctgtccggcacggtgatccgccggatcaagtggctccccgacggcatcctggtggacggggcccgggtgaataccgccttccgcccccgggagggacagactctgtccgtccgcctgtccgacccggagcggcgcagcggcatcctgcccgccccgggtcccctggatatcgtgtacgaggacggggacctgctgatcctgaacaaggccccgggggtgccggtccaccccggccccggacattttaatgatacgataggtaattttttgctgaattattacaattcggagggtattgaaggagatttccaccccgtccaccggctggaccgggggacctccgggctgatggcagtggccaagcacccccacgcccaggaggtgctgaaggggcagctccacaccccagccttccgccgtgtctatctggcggtgtgcgacggcgggcctcagcccccctccggtgtggtagacgccccgctggggccccgggagggctccctggtggagcagatggtccgccccgacggcaaggacgcccgcacacggtatgagaccctgtcccgctccggggggcgttccctggtccgtctggagctggacaccgggcgcacccaccagatccgggtccacatggcctctctgggctgccccttgacaggagatttcctttacgggtacgaggaccgttccctgatctcccgccctgccctccactccgcccagctgtccctccggcagcccgtcactgggcaggagctgtcctttaccctcccccttccggaggatatggcgcgcctgctgacccatcagaaaggagagaaggagccgtgaatgtgatccggcgctggatcacccagcccaacgccctgctccgggcggcagctttgttcggggcaggcatggccctgacgctggcggcggcctgcctcagcgggcctctgctcccagaggggctcctgaaaaacgccaatcccctgtggaactgggcggtctcctccagcccccttgtgggcgggctccagatcttcgggttcaatctgatctttgcctgcgtcctcgtgggggccaacctcttcgccaggggaccgcaggggggtctcctgatcccctgcggctactcctgtctcctcctgctgttcctgctctatgggctgatggtgggcacctggtccttccaaatgggcggagaagcgccccctttcgcggcccggctgctgcgcatgctccatatcagcgaggcctccggcatggtggagatgtccgccttctgctgcatcgcctcgggaacggcggacatctccttcgtccagaccctggggggccggaccaccgccggacggctgcgggatatccgcctgtcccgtcaggatgggctggtccttgctttgggcttcctgctcctgttcgccgccgccatgatcgaggcggccagcatcctccgcctgacctgaacacagggcccgggatcaaaaatgattccgggcccctcccttttaccctttggactgattttgggtataaataacctcccttcgtcaaaatgacgtgggaggtatattcgtagttggcagctaattgataaagcagaatttatatattctcccgctttctttcgtgttcctgatgctaatgtttaaaatcaggatacagacttattcatccacagttcaactctataataactatttccggtggattgttgattctcaccggaatgatactgtttccaatacctctgctcacaatcatagttgttccattctctgtataggctcctgcgtcatatttcgggaaaagtccttggcctggagcaataactcctccccccaatggcaatcgaaattgtccaccgtgggcgtgacccgacaatactaagtcaatatttttattttgatagacattaaaatactcgggtctatgtgataaaagtatagtaaatccatcgctaatatttacctgcgaaagttttgcttccaaaatactttccgataaaagacggtctcgttctgaaaaatcagggtcatttaatcctattagctgaatacacacatcaccatagttcaattcgatggcttcatcttgaagaacagtaattcctgtattttgtaatgatgtctttaactcttcgtattgtgagccgatccatgcctcgtgattgcctgtgacaaaatagcaaggagcaatttttacggcttgctgagcaaaagataatgcaacttcaagatttgtatggttagaatctattaaatccccagtaatagcgattatatttgggctttctgcctctaatatatcaattaacttttcattattttttccgtattctgcattatgcaaatccgaaatatgggcaatagaaaatttgtcaaacgcttcaggcaagtctttagatgttactgttaatttggttgtttctaccgacagatttccccaaatcacccaactgaccataattgaaatcagaagcatcacaagtataatcgttgttcgattttttatctttctcacgacattatgcctcgccattataaatcctgctccacaaattccaatctattgttttgtttactttatcatatttatctgtttgcatcaatgtttggtacaatcgatggagttaaaacccatcgattcaaatgtaaaaagggaaccgggccctgttccgttgccttttttcttcccatggtgtataatgcccgggaatctgatgagagaggaggggatgctatggaccagctgaaggagctgcccatccccctgctgctgtggtaccgggagaacgccagggtgctgccctggcgcagccaccccacgccctaccgggtgtgggtgtcggagatcatgctccagcagacccgggtggccgctgtgctggactactaccgccgctttctggaggctctgcctacggtggccgacctggctgccgtcccggaggacgcactgatgaagctgtggcagggactgggctattacagccgggcccgaaacctgcagcgggctgcccgtcagatcatggaggagcacggaggaatctttccctccacctatgaggagatccgcgccctgtccggcgtgggggactacaccgccggggccatctcctccatcgccttcggcctccccgtcccggcggtggacggcaacgtgctgcgggtggctgcccgggtcacgggagacgagggggacatcgccgcgccggccaccaaaaagcgggtgaccgccgccctggcagagatcatccccctggacgcccccggcgacttcaatcaggccatgatggagctgggggccaccgtttgcctgcccaacggggcgcccctgtgcgacctctgcccagcccgggcgttctgcactgcccgcctcaccggccggaccggccagctgccggtgaaggcggccaagaaggcccggagggtggaggagcgcaccgtctttctcatcttccacgaaaaccgggtggccctgcggcgcaggccgggacgggggcttctggccgggctgtgggagtaccccaacgagctctctcccgccggggacgccctggcccgctggggcattgctcccgcctccctccggagcgccgggacggggaagcatatcttcacccacatcgagtggcgcatgtccgccctggcggtggaggcgggctcccccgcgctgccggaggggtgggtctgggcggaccgggctgccctggcccgggaatacgccgtccccaacgccttccagccctttcaaggggcggtggaggagaggctgggacatttttgaccggaggaggaaacgccatgatctgcgatctctgccccagacgctgcggggcgctgcgcacagaggagcgtgggctgggccgctgccggatgccggagctgccggtgctggcccgtgctgccctccaccgctgggaggagccccctatctccggcacccggggctcggggaccatttttttctcgggctgctccctgggctgtgtgttctgccaaaacgaggagatcagccaccgggacttcgggaaagcagtcacccttgagcggctggcccggatctgcggcgagctggtggaccagggggcccacaacctcaacttcgtcaaccccacccattacgcccatgtagtggggcggctgctggaggagcacccccagcccgtcccggtggtgtggaactccggaggatacgaccgagtagacaccctgcgggctttggagggaaagatccagatctatctgcccgacctgaaatatctggacagcgacgccgcagggcggtattccggcgcctccgactatcctcagacagcccaggccgctatccgggagatggtgcgccagaccggcccttgcgcctttgacggggatggcctgcttacccgcggggtagtcatccgccacctgatcctccccggccaggtcagtcaggccaaggcagtgatggactgggtggcggcggagttcggcccagggactgtgctcttctccctgatgagccagtacaccccctggggccggtcggcggaatttcccgagatccaccggcggctccgggccggggagatgcgggcggcggcggaatatatggcaaatctggggctggagggctttacccaggagcggaccagcgcccagcgggaatatacacccccctttgacctgaccggggtggcgggggagggaggagcactgtgatatccctggcccgtctgttttccctgatgaagcgggaagccgttctgtccgccgccgcggcgctggctctgctgtccatgctgtggatgccgcccgacggggcctatctgtcctatgtggactggaggaccatggcccagctgttctgcctgatggcggtgatggctgggctgcgggagctgggggtcttcagccgcctgggccggcagctgctctgccgggtcaggagcgcccgccagctggagtgtgtgctggtctttctgtgctttttcaccagcatggccatcaccaacgatgtggccctgctcacctttgtccccttttccctggaggtgctgacactggccggacgggaggagcgggcggtgccggtggtggtctttcagactgtggctgcaaacctggggagcatggccacccccatcggcaatccccagaacctgtatctttacgcccagtccggccagggactgggggattttctggccctgatgctgccctacacccttctgtccggcctgatgctgctgctctgtcttctgccggggcggagcgcccccctggccggtctggcccccggcggggcggagccctctctgcgccggcgtcggaccgggatgtacctgcttctgttcctggcctcggtctcctctgtggccaagctgctcccggtgtggctcctcaccgccgccgtggtggtgtgtgtcctggctgccgaccggcgggtgctacgccgggtggactggtccctgctgctcaccttcgccgcatttttcgtctttattggaaacatgggccgcgtacccgccttccgctcgctgctggagcaggccatctccggccacgagctggtcaccgccgtgtgcgccagccaggtcatcagcaacgtgcccgccgccttgctcctctccggcttcacctcggagtgggatgcccttatcgtggggaccaacctgggcgggctggggaccctgatcgcctccatggctagcctgatctcctataagttcttcgtccgggagcacccccagaagcggggagcctatcttctcttctttaccggggccaacctgctctttctggccgtcctgctcccggcggccctgctgctgggctgaccgggccgcgcccatgggaagggactgactggtccacttttctaaaaacagggaggcgcgctgattcatcagcgcgcctcaatttgtttctatctccgcaccagattttccaggggtttcccagcctgccagcgattcaggttgtccagcgcctgccggacgcagttggcccgggtgacctccaggcgcatcccgcccgcggagtggggggtgatgatcaaattggggatcgtccacagggggctgtcctggggcaggggctctgggaccgtgacatccagggcggcgccccacaggcgtccctctcccatgacggccgccagcgcctcctgatccagcacggagccccgccccatgctcagcaggatggcgtcctccttcatcagccgcagccgccgcgcgtccatcagtccttccgtctggggggagtggggcagcatcagggccaccacgtcggcctggggcagcaggccgtccagctcctccatcaccgccagccgatcaaagccctccaccgaccgggagacatcccgcttcagccccacagtatgggcacccagcccccggcacagtccggcaaaccaggagccgatgtgtcccgcccccgccaccaggacggtggcaccggagagggtcttcatctttcctgggtccgtccagagccgctcccgctgctgatcccggcactgggggaggcggcggcacagggccagcaggcaggccagggcgtgctccgccaccgactggctgttggagccggcggaggaggtgaggaccaccccttccggcaggacgccgggggccagatactcgtcggtccccgcccacatggactggaaccacttcaggcggggggcgcggctcaggtcggcgggccggggccacccgaaaaggatggtggcctgttccagctgctccgctgtcacagtgcgccgcccggcgcagacgtggacggcccggggggctgcctcctgaaaggcagctttttcctcctccgtcaccggcagcaaattcagaatatactcagccatgggggagcctccttttttcaaaagacagatgatattgattataccccagtccctcccctgatggcaagagcggcacgttccctcctccgacggtacggcctatgctcacttcagagggatgcagaactcacaccggtgcagggccaccttttcggcagagtagcgctccaaaacggggctggcgcggtccaccggcagcccggcggtcaggcgctccagatcttcccagaaccgggagacctcccgctccgtatgagggatctcaaagacggcgtaccgtccgccccggaccctgcgggtgtccagtgggagccgctccccctctcggatgatgatgcccacatcataccggcaccggtccggcggagttctgctgggatcgtccagggcgatccccagcaggacggtcccggaccccatcctgccccgctccttcaggaatgccttcaggcgctccatcagctgtcggttttccgggccgtaggggcctgtcctgcgcagataggcgatctcaacagcctccatttcttccatgttcaacggtgatcctccctttctgttccgccctgcggctgttttgacccatcataagcggaattaaaatgattttcaagggggattcccctgcagtcagggcaaaagtggccgcttccatttcctttgcttttttcctcctcgctgtggtaaaataggcacatcctgcccggctgacaggccgggccatgccgcatgaaaaaagggagggggggagccacatgaccatcacgctggacacaccggtgacggattttccgggcgtggggcccgcccgggccaagaaactggagaagctgggcatccttcgggccgccgatctgctcacctactacccccgggactacgaggaccggcgccggatctggtccattcgggctgcgccgctgggggagaaggtctgcgtctccgcccttgcggcggagcgccctgtcctctcctacatccgcaaggggatggagctggtgaagctgagggtggtagacaactcaggcaccctctacctcaccttcttcaaccagtcctatctgaaaaattccttccagcctggggaggagtatgtgttttatggggagatccaggagcagggctcccgccgctctatggtcaatccggtctttgagcgggaaggggaccgggactttactggacgcatcgtaccggtgtaccccctgactgcagggatctccaatcatctgatggtctccctgattcgccaggcagtagagcagtgcgccggccagggggcagaatccctcccggccagccttcgggccgcgcaccggctggtcccggcggagcgggcctgccgggacatccatttcccggaggactttgacgccctggagcaggcgcggcggcggctgaccttcgaggagctgttctacctctccgccggcctgacccttctgaaggaccgccgggacagccagtgctccgccgcggtgtttgccccccgccccttggaggcgttctgtgccctgctccccttcgcacccacccaggcccagcggcgggccatggaggagaccgcctgggacctggcctctggccgccccatgaaccggctggtccagggggacgtgggctccggtaagaccacggtggccgcctggggggcttggctggccgcccaaagcggctggcagtccgcgctgatggcgcccaccgaagtgctggctgagcagcattaccgcaccatgaaccagctgctctccccagccggcgtccgggtggccctgttcaccggctccatgaccgcggctgaaaagcgggcggcccgggccgccctgcgctccggggaggtggacctggcagtgggcacccaggccctgctgtctcagggggtggacttcgcccgcctggggctggtcatcactgacgagcagcaccggttcggcgtggcccaaagggcggcgctggccgccaaaggggcggcaccgcagtcctcttccccccacgtgctggtcatgtccgccacccccatcccccgcaccctggcgctgatcatctacggtgacttggacgtgtccgtcattgaccaactccccccgggccgcgtcccggtgcagacctttgtggtgggggagagcaagcgtcagcggatgtacaactttgtccgcaaacaggccggagagggcaggcagacctatatcgtctgccctgcggtggaggagagcaccggggacggggccccgcccggcctgatggacctgaaggcggtgaaggtctacgcccggcagctccaggagcagatctttcctcagctgcgggtggggctgctctacggtaagatgaagccccgggagaaggaggccgtcatgtccgccttcgccagtggggagctccaggtcttggtgtctaccaccgtcatcgaagtgggggtggacgtgcccaacgccgcccttatgatcgtcgaaaacgcagagcgcttcggcctcagccagctccaccagctccggggcagggtgggccggggccggcaccagtcctactgcgtgctcctcacctccaaccgcagcccggacaccttggcccgtctgcgggtcttcgcctccaccacagacggcttcaagatctctgaggaggacctgaagctacggggccctggcgacttcttcggccgccgccagcatggcctgcccaccatgcggctggccgatctctccggggatatgcgcctgctcagcgaggctcagcaggcggcacgggacctgctctccgccgacccccgcctggccttgggggaaaaccgccctgtgctggagcgagtacgggcactgttctccgatacgccggacatcttcaactaaaacagcagaccggggccgcggctcaagccgcggccccggtctgtcacggcaggacaaaggggatgttcaggtcttcatggtccgccgtctctgtatgtgccagctggatctggatgcgatcccaggcacagttttggatgtgatacagatactcgacatgcttcctcccgtccacctcctccgctgtcccagaggtggtcacgccgtcgaatgtgtgctccgtcccctccgggtcccgaaagaggaaggtgaagggggcgtccggccctccctccgcctgccggaaaagcaggatggtgcggtccccttcccggcagacctgaagcagctcagtcccctccggaagtccgcaggcggttccggcggccaggtcgatgtccgcccactcctgctccttgtccagccatttcagcctccggatggagagggtcatctcctgtccctccaggaaatacaggctctgccggtaatagtggagcatggagcgggaatcctccccgccggtggcagtgatatacccgtcccctgtgtcgtattcttttccattcccgtctacaaaggcaaactcggcccccgccagccagcaggtattttccgggtcctcctggagatggatctccgtgtgggtggggtaggcctccagctggtccaccttcagccgctggccgtccgcctccacccaggtgtccaccaccaccgtcttgggaccggccatcttgtcccggtccagctggatggggaacgtgagggccacagcttccccctccgccggctctccggccccgtccactgctggggccctgttttccgcttcccctgctggtccggccggttccacggtgcacacggccaggaactcctccgggagttccccccggctgaaatggaactccgtgtgccgcaattcctccgcctctccggccgttccgctgtactgggcggagctgtatccttccaggggggtgccgtccggcgtctggagctcccaggacacccggccgccgccctccacagaatagaacaggtgtgccctggctggggaggcgatgacatactccgcagtaacggagatcctgtccgccccctctgtccggccgatatactgcacatagtcgtgctccaccgccgcccgcaggctgggagagaaggccaccgccgcggccagctcccgcaggaccggcaccttggcgcaggagatggcaaaggccggggaggcgttcaccatcaccacgaaagcggcgcacacaccagccagtccggccagcagctccgctggccgccggcgcctccgcctggcgcggtccatccctcgccggaccgcgctctccagttccgggggctcccggcgcagttgttccgtcagcacccagtattcctctctccggttcatgaccccacctcctgtccgtctgtcaggtccagcctgagaagctccagggcccgccgctggcgggaggataccgtccccctggggatctccagggcggcggctgtctcctccagcgtcaggccggtaaagtaccgcaggacgatcacggatcgcagctcttccggcagcgcccgcaccgcctcccgcagggagagggcatccatgtgctccgcctccggttccggcgggacgcagacccggcactctctgcggcggcggcgcagctcgtccttgcacacattgatgaggatccgggtcagccaggtctcgaagaactcgggctgccgcagcttccggcggtcccggaaggcgcggtacaccgcctcgtccaccgcgtccaccgcagcgtgctccccgcctaggtagaggaaggctgtgcggtagagccgaccccgctggtcctgggcccggagggcgaattcctgttccgtcatgctccatccctccctttttgaccattagacgccggaggtccatgttttgcccacctccggttgaaaaaatttttctgtgatattataatagcagacaatgaaacaaaggaggatcgctatgctgacctttcgcgatatgacactggacgaccgggacaccgtcctgcccatggtggatgccttctaccggtccaacgcggtagaccacccggtcccccgggagatcgtggagcggtcctttctggctgctgccgggaatgagcccctgctccggggcaccctgatctttgaggaaggccggctggcgggctatctgtatgtcaccctgtgttactccgcggaggtgggcgggacctgcgtcttcattgaggaggtctatctcctgccggagttccgtggccgcggcctaggccggcaggtcctggagtggatctttacccagtacccggacagccgccgcttccgtctggaggtcacccagatgaaccagggggccgcccatctgtatgagaagtgcggcttccagtacctgcgctacgaccagatggtgctggaccggtgaccagcaggccatcgtgatttattgtgggaggaaaacttgaaatggactatgttgaaaaggcccgggcactccgggcagaccctgcggtccactacaactgttgtcaggcggtcctggtgacctttgccgaccggctgggactcacgccggaacaggccaatgctctgggggcccactttgggtccgggatgcgtcacggctccacctgcggcgcggtgagcggcgctctgatggtgctgggcctgctgggctgcgatgagaagcagtccaccgcactgctccgagacttccggacacgtcacggcgcgctggactgcgccgacctgctccgggcttccaaggaacggggagagctgcgcaaggaccactgcgacagcttggtcctggagatgtctcgatttctggaggaactgctcagggagcagagcacctgacccagacagaggagtgggcggggactgtcaggtcc

SEQ ID NO: 13532 - DNA, 762 bp, Unknown
  gut microbiota DNA sequence
ggcgaacacgtccagggagccgcccaggcccaccatcaggtgggcgccggtggcggggccgtgctccaccatccacagctcctgcttgggggcccccaggcagacgaacaccacgtcggcggcggcggccctgatctcctccaccaccgggccgtcctcccggaaatacccgtcatgggtgccgcagacgatgaggccggggtgggcgtccttcaggttggcggcggccagctccgccacgccgggcttggcccccagcaggaagagccgcttgccgtgacgggccatccacgccagcagccgctgggcaaagtcgatgcccggtaccttgcccttcagcgggcggcccaggattttcgcggagtagaccacccccacgccgtcggccagcaccagatcggcccccagcaaggcctgccggaaggccggattgtgcttggcggccagcagaaactccgggttgggggtgaccgcgtagtggaagcccccggcctccaccagggctgcgccggccgccgcagcctcctccagcgtcaggtcgtcgaagccgacgcccaaaacatcagtcctcaaaatacattgcctccgattggaattctgtccataatttcatgccattttaccatagatagcgaaaaaagtccatgcggaaaccgggaaatcaggggcgggaaagatgaagtttctgtgaagaatcacgaagtttcccgttgacaaaccgggcggatgtgctataatagggcacagctaattctttagctg

SEQ ID NO: 13533 - DNA, 40064 bp, Unknown
  gut microbiota DNA sequence
atgggaagtttcaatagacccattcgtgtcaataatacatgtgcaaaatagacaggagtgacgggaaaatctttgtcagatatggagaagattttttctcccttgagagtttttgtagggatttgaagcggggctggtatcctgtgcctatccggagcagaaagaagacgcgctccggccattctaggagagaaaaggagacagagagatgaccattgaactgaatgtcctccagacgacagggctggccatgctgctgttcgtgctgggccgctttatcgtgaaccacgtgggattcctgcggcgctgctgcatcccggcccccgtggtgggagggctgatcttcgccattttccacctggtggtccatcagacgggactgctcaccctgacctttgacgagacgctgaaaaatgtgttcatgatctggttcttcaccagtgtagggtacggggccagcttcaaggtgctgcgcaggggcgcgggaccggtgctggtgttcctgctgctggccaccgtcatgatcacgatgcagaactttgtgggcgtaggcttcgcccagctgttcggcttggatgacccccggctgggcctgtgcatgggctccattcccctggtgggcggccacggcacttccggctccttcgggccccagttcgaggcggccggtgtggcgggagccgaggtggtggccatcgcctgcgctacctacggcctggtgtccggcagcctgatgggcggccccatcgcccgggcgaagatcaaaaagtatggtctgcactcctccgtgaaggcggaggccgtggagaccgtggagacggtgcaggagcccagcccggccaaggaccagggcgcggacagcatcctgaaggcattcatcctgctgatcattgccgccggcatcggcacctatatcaatgcctactttgacggcaagatcaccctgcccacctatatgggcgccatgatcgtggcgttgatcattcgcaatgtcagcgactggcggaagatcgagctgcccatgcacgccatcgacatcagcggaaatgtctgcctgaatatcttcctggccatcgccctgatgaccctgaagctgtgggagctggcggccttggcggtgcccatgatcgtcaccctgctggtgcagaccctcatcatgttcctgttcgcctccttcatagtattccgggtcatgggacgggactatgaggcggcctgcatgaccaccgctttctgcggcttcggcatgggcgcgacccccaacgccatggccaacatgctcagcgttaccggccagtatggccccgcgcccaaggcgttcttcgtggtgcctattgtgggaggcatgtttgtggacttcaccaataccgccgtcctctccgtgttcctgaatttcctgcccaaatgagggcagaccaaaagctcccaccgcctgcgggcggtgggagctttgccgctttttcgagaaagatgcagtctgccgcggacaaacctcacactggcagcctgagcagtgtttttcccgacacgcatgtcgccggggaaaacggatcagaactgaattcacgcctgcgggagcgaactctgcgaggctttttctgtgggaggccgacggctatgatctgggcgggggtcagtccggcccgttctgccgggcggcggccaggcgctccgcctctttttttcgcttcttggccagatatcggtcctcctcgctgaacacacagccgcagtatttctgcatatagaagccgtggtcccgggcaaactgctgcccctcccggaagagggggcggaaatcccggtacaggaattccacgccgtactccccgcccatggcccgggccacggcgcagatggcctcgtggttctggtaggggctgatgagcagggaggtggtgaagctgtcaaagccgtgctcggcggcatagcgggcggtctcctccatccgcacccgatagcagtaggcgcagcggccgtcgatgttgtcggctacatgctggacgaactggcgtaggccgtagtcattgactaccaccagtgggagggagatctccctggcgtagtcctccaggcaggtttttcggctgcggtactcggtataggggtggatattgggattgtaccagaagccggccagctcgatgccctcctcccgcagggcggcgatggggcggttggcgcagggggcgcagcagatatgcatcagcgtcttcatgtcagtctccttgttctgggtcgaggatctggacggggacaccctgacgcatggcgtaggccagggtctgggcggttccgcccttgggcacgccgtcatagaccgacagcaccagggcagagcggtccaccatatagcggttccgccgctgcatacagaagcggtcatagcggtgctggaccagagtctcgaagtcgcactggtccagaatggcctgataccggtgccgttctgcctcaggccaggcgtcggcctgactctcgcaggggcgggcggcctccagagtgacgccggagcggcacaggcgcagggccagcaccgcctccgcaaagtacaggtccgtcccccgggccatgccgcagatgaagtggcgcatcccctgggcgtaggctccctccaccgcctgggtcagacggcgcttcagcgtcagacagcgggggtccgactcccggctgccccagggcagcttgtccgggcggtgcccggtgaagcagcaggtggtggcgcggtccacggggcatccctcccagcagtttttttctattgtaatctgaatagggaggattgtcaacggagatagaaaatttgttcgaggcactcagctgaaaaagtcccgcaccgcatcagccgctgccaggccgttggaggccagcgccggatgcgccccatggtcgaataggcacatcctggcctggggcaggatctccagaatatgctggtattccgcctccagatctttccggcacatgacgtcctcccggctgcccatcagcagtaggggggcctgcagctcgtccaggggcctggagaaaagggggaggccctcccgggcgcaccggaccagagatcgggtgtcccggtccaccacttcctcccagtccgctccctggcaccactggtaaaactgacgcgcctggtgggatgctttggctgcggcccgctcctccagcagctcccggtcaaagccgcggtgaagggtgcggccatcaaagctgtcggccacgatcccccgcaccagatcagggtgctccagccccgcgttcagggcggcccaggcaccgccgctggtccccaccagaaagacgggaccaaggcccaggtgcctgatcagagcggcggcctgcctgccctggtcgatccagagctggggtggaagctccggcatccgctgagagcgcccgctgcccaaaaaatcaagcaggatacagtgaaagcagggggtatagaaggggagcagaaactgaaacatctgggaagaggcggtgttcccgtggaggaacaggaggggaggacccacaccggagcaggtgtagaagcagcgcttcccctgatagaaaaaatagcctccttaattcggatcggagcagagggggaagacggcggaaaggtgcggcggtgcggtcagccgcggcagcgggacgaggcgaaggcgaggatcaaagagggaaggatagaggcgatcaaggggccccattgggtggaccaggaggtgagggagagggggacccaaacgatgcccaggcagatgcaggcggcggaaaataggagctgccgcctccgagagtggtgctgggggacataggggtacagatggagagcccaggcaacgccctgccagagattatacaggcccagcagaaagacagagggggtgaccacaggcaggagacggaagatgcacgcgagaaaaccagccagagtgaggaagacatagacaccccagtagatccattttttcatgccgcgatccatgtgagagacctccttgtccgcccggtgccggatggcagacagctcatccgggctttgccaacagtatagcacagggacgtcccgtgttccatgctttttcttgccgaaatggcggggcggggcccgcgagaagagaagcgccggcgggctcaggcccgccggcggagggatgggggagcggagcgctcagggggcagcggggcccagcagcaccggctggagctggcggccctccagggcggcctgggcggcatcagccaccagggagaagtcggccaccagggaggcgggcttctcctccgggtcgtcctgccggaaggggaccagatagatgtacttccgggccatcagctgccccaggttccgggccgaggcggccagcccgtcgttggtagagggagccagcaggatggggcggcagttgcgcaggtgggccttggcggccagggtgacggtggtgtcggcgatgccgcaggccagcttgcccagggtgctgccggtgcagggggcgatgatcagcaggtccagcaggcccttggggccgatgggctccgcctccttctgggtggcgatcacccggtggtcgcagatgcgctccatctcccgcatcaggtcgtgggcggtgccaaaccgggtgtcggtgtctgccaccacctcagagacgatggggatgacatggtcataccgggccttcaccgcctccagggcctccatggccctgtggtgggtgcagaaggagccgcacaccgcgaatcccacagttttatgttccatattgcagccttcctttccagatatcacacgtccagctcgtggagcatgttgtagatggtgctccgaatggcgccgccagcggtgacaggggccaccttgccggggagggacagggcccagatcacctgacgtcccaggcggtcggcggccttgcggtccaccccgccgggcttggaggccaggtcgatgatgaggcagtcgggccgcagatctttcagttccgtctcccccagtaccggggcggggacggtgttgaccaccagatcgtagccgcacagccagccgtccagaccgccgatctgctctgcgccgtagccctcgctctccgccagagccagctgctcataccgccgggcggccacgctgacccgggctcccagggcggcgaagcgccgggccgcggcctgcccaacccggccgaagccggtgatgagcacccgagccccgtggatggtgacaggcatctgctccatagccagctggaccgccccctccgccgtggggactgcgttggccaccgccagctcctcccgggcgaagtagtcccgaaggatcagcccccgggcgtcagccatagcggcggagaccgggtctacccggccgccacacaggatctgggggggtgagagggcatccagcagagaggccaggggaagggcagagcgggtaaggggggtgttgaccatcccctcggccccggccaccgggagagggaggaccacgcagtctgcccggccgatcccgtccagcgagtcggccagggtcaggttttccgtgggcgtgaccacgctgccgctcagggcgtaagtatggacgcggtggccgtcctccgccagcaggcgggccagacaggcttggcgcaggtccccgcccagcacccagaaattcagttcacgtttcatggcgtcagcctccattctttgctggtccagtctatgacgggggagaaaagggggttccggggccggagagtggctgtcagggccctcttgctgggaaagtaaaaaatgcggagcggggcgcggcattttccgtgggctttcccggggattttctttgcaatgcgggggtattttgctataatatactatctattggtatggacagatccaaaatcttccgacatccacgggggagggaccgctctcccgcggaggcgaggtgtgtgtttgtacttaaaagcattggagaccagcacctgcgcgctgtgtccgttttacccaagccgcccgtctggcgctcagcgttcttcaggaggggcggacattatcatccaacagatggcgaggcgcaggaaatcaccgaaacgatgaaagccgccgatcaaatgacatggagcggtaagatgaacaatatccgagccggtgcaatggaagttgtagacaaggagatcatatacgcataaagtgaagtgacagcggagcaatgccccttttatcgtattcctgaggtgttggctcacccgacccgatttccggtggctgacagcagatgcagaaatcctatatgctctgacgccagaccgcatggggccatgcctgattatccctgtttgttgagtgtggtatgcagcccataagaaggtgcgtctttactggaagggctgagataacagttcttggaagagactgtattcaaaaactgatgccagctatccacataccgctcatactgagagcgctgcgtgtgtgttttgccatgccaggtgcattcctgcgccgtataaaactggttccagtagtgatttatagaaacaccccagcggggtatcttgggatgtggttgcccagcccttgcggtggcttctgtcaggcccaaagcgcacagtacctaaacccgcagttccccgacttcacagactgttctgtagacggattatatgagtgtgccgccctgacccagtggttctggagtcaggcagaagaggctggagggcgctttgaccgccgcaatggctgccccaattaccagaagacgttgcgggcggtgcggagggactgagcaaaactatgatctgatggaattgatacagtcttctctcatcaaattcgtcagtgctgacggctttgagagagccagtcacaaaatacagatttcagtctgagacagaaaaatggaataaaaagttaccgagaaccgcagctccggggttctcggtaactttttatttgctttcatttttgaaaactattctgcgacagagccgtttcttttgaagctgtcaatcgacctgctggggaaaggctccggaggagaagggcatgaaagaaaaccatctggctcttttctgcagagtgagtaaaaggagccgaacatccctcaccttttgctgtgcttattctgacagtgatacagtgctgaagtttgcgatttgctgctccatggcagtgagacaaacgcattgtttcgctcttaacgacgggctggatcatttttcttcaaatatttcgatactgtactatacagcagatccatctcaacaggcttcgagatgtgagcgttcattccggcctccaaagcgtcacgcacatcctgagcaaacgcatttgccgtcatcgcaaagatggggatggatgctgcgtctggatgagcgagcttccgaatttctctcgctgcctcatagccattcatcaccggcatctgtatgtccatgaaaattgcatcgtatgttcccggctcagactgatcgaactcgttgaccgcctgaaggccgtcacacctaagtgtaaatgtggctccccacatctgaagcagctctcccagtatctcagaattgatctcattgtcctctaccagcaggaaatgatagccggacaagtcaccaggctccacctcaatgggcacatcccggcagtattgttcctgatcagagggaagatcaaattccagttccacctcaaactttgtcccttgccccagcttgctttccacttggatcgtgccgcccatcaaatcgaccagtcccttggtgatgctcaatcccaggccggtcccttccaccttggagacctttttgctccggttaaatggttcgaacagtcggttgaggaattcatcactgatgccgattccggtatcctgaactgtgaagcggtagcgtacgcatccgtgcctctctgcattgatctcctcaacacggaagatgaccataccgccctccaatgtgaacttgaaggcattgctcagaagattgatcaagatctgcttgattctcagcgcatcgccggtaaatttgatatgctggaacacactcgtctcaattttgaagcacaggcctatgttttccgcctgagaggtcataataaaggatatatttccaatcagcccctcaatatggatcgtttgaaggttcagatgtattttagactgttcgatctggctcatatccagaatgtcattgatcaggctgagtaaatgctgggatgacacagagatcttgtacagataatccttcagtttgtcggtgttatccaggttcgcaagggccagggtcgtcataccaacgatcgcattcatgggcgtacggatgtcgtggctcattgaggagagaaaatcacttttcaccttactcgcgttttccgcttcgcgcagtgctctttcaagctcttcctttgcctttcgctccgcgttcaagacgtccgttacatccgcccggatgaagcagacccgtccaagccgcagatcgatggccgaaatgtgcatttttttcgttcggatctcaccggcggcattgtacacagaaaagatgaaggagtagcttccctgctcttttaaccgttccagcatcgtggcaggatccagcatcttttctacatatccctcttcgccccagtcttccacaagcgtctctcccacgactttccggatgcgctcagaattacagcctgtcatctcagggatattgtcatctccaccgctcacgatctcatattggtcggtaagaagatccacatccgccaccaagtcatatttcgtagaggacagcgttaaaaatatcttatctcgtatcgtctccttcgtgatgtccgtcacagtcaggataccagtaatatctcctgtatccggcatctctactaaacgcaccttaaattggacatatcttccggcacgctgcttcgggaggtcgataaagcagggcatgacgatttctctgtcgccggcggcataggctctttgagacggtttgttcaaatatttggagtaaaaggtctttcgctcctcctgatcgacgatcagagtccccagccctgtgaaaaaattttcccgctccgaaccaaacagagaaagaaggtcggagtctgtgtggtccacgatctcaaggatctgattttttgtaatgttacagtgtccaagaatcaaagcatccggtccagccaactgatagtgctggtgtatctgctcctgatactgctggcgcagctgctccttgacctttttttctgcggtcacatcgtgataatcggcatagacccttacacagtcgccgtcgcactgaatgacagacaccttggtcttgacccagatgtactccccgtttcccttttgcaggcgatactcaagctcatatttctcgcgtttttcgctgatacagcgatccagattctcacgaacgaacgcctgatcgtccggatgcacgccggcaagggcgctctcctgatacatggcccaggcgtcctcatggcgcatacccagcatttctgaaaagccttctgagagatactccggtttgatgcttccgtctacatcatgtcggatcacggccatgccgccgggaagatatttcaccgcagtctgaaaatactgctccagccgctcctttgccctgcgttctttcagttcctcagtcgtatcgcgtacatatttgatgtacgccggggtcccattccagtctgttacccgggtcctcgtcgtataggtccttccgttcagttcgtggacttccacaccttccgattgtgcagacgcgcctgaatacagggagcagaactcacatggttctgttctgccgtgcagcacctcgtagcatttcccggctgggaaggcgctctgtgctccgcccctggatttcaggctgttggcatacaggaggtcgtagttttccgaatcgatcacataaatatcgtccgccgattcactgacaatgtgctgaaacagctggacctccggagatagtccggagaacagcacctggaactcctctcccaccatccatcccaccagatgacaccagatctgacgcccgcccttgcttttcagccagaaatgcgtgctgagctctgtatgctcttcccgcgccacgcgcaaggcttgttccacctgctcccggtcgcactcgcaaacgatctgcagggcgtttccacgggtaagcgcttcaaattccgaccgatcgccgcagatcagctttacaagcgtatcagagcaatactgaaacacaaatttgtccgtggacccgtcatagacagcaaggcctccgtggagcgcatcgatccctctgttttgattctgattcataaacgatccttcctgcctctcagttttcacgtcggatgtggagtttttcaacgcgcatacctctggacacagagccacgcgcatcgtctttttgtcgacctgcttaccggccgctgaacccacaggaaagcgtcaaagggaggctcacggcaggacctcgttgaatacctggtcgatccggctgtgcagcgtctgcaaggtcttttgtaagtgctggttctccgctttcagatcctggataaacagttggcgcttgatcttcagccgcagcagctctgcattcacaggcttctgaagaaagtctgacgctccgttggtaaagccctccagttcaatatccacgccctccaggctggtcaggaagatcacggatatattggaccagttttcagattttttcagcaccttgagcaggtccatgccgctgacgcccggcatcaccatatccagcaggatcagattcaaatctggcgaacgctgaagctcgcccagggcctctactccagtattggcgctgaccacctcaaattctggctccagcagagccttgacgatggccacactggtcacatcgtcgtctacgatcatgatttttttcatccgcgttccttctttcaaccggtttgttccgctaggaactgggtgatgctctgggtgaccctgcggtactcctgggtaagttggcgttgataagttgtcagctcactagggggcacagcggttctgatctgctccagatattcggcagacagctggcgcagcggctcgatacccagattagcagtcaggcccttcaacgtgtgaacatggcgctccaacgccttcatgtcacgaatgtcataggcatgggccagggcgctgaaggtcgggtcctgtggaaatttcaggataaagcgcctcaaaatcgactccattcctcccaatctggccacagttgccggtgcatctaccccgattcgctccagcagttcatgaaattccatacagtgtcactcgctttctaacaatcgagctgcgctctcttcgcagagcatttgaacccgatgtctgctcacagtttgtctttatctaattgtaacagtatttttacgatctgtatagataggaaatctcaaattctacaaaaagttacagtatgtctacaagggaggagacgagattgttctgcataaaaatgatccggccctgtacggaagcgcactccacagatctaacttaagagtatggcattgataattgaacaagatataccggccaaaggcaaaaggagtattgattttcagataaaattatgttgcacatatatcacctatcaccgagctcatttgcgcttctgatgatcttaagacagtacaatatctggaaggtcatgaaaacagcaaaatcacagcggactttgcattaaggtgaagtacagtaaaccacatcacttccctcgtgtttaccggagaatgttataattgatgtaagcaccgaatgaccgtgaggctgtgcggtgtgttttgctgtcagcctttcgggtaagcctccacgatacatccctccatctcccggttgtgtcccagcaccctgcggagcttggcctcatccagcaggccgatggagctgacggtacggaggagttggttcaggatgttcctgctgctgcgaacttcatagaccagcgttggcatatcaacaggaggggcttcctagatggcatcgcggttgatgcactgccggatgaaccgcttatgggagcctcgcctgctgctgtactggtcattgagacgggagagctccttgttagacggacagatgacgatctggttgctcgcctcaaaagatatggcacccaaggatatgcaggagctgctggacaaggcagcctgcggggagtaaaagtgttcccctgtttcagcctgtaaggtcaaaaacaagggaaactatataagactcaaacattgatattataagcgattatcgctcactatggggatttaaaactgactctgcctggctcagacgataacaaacaaatattcggtccggtccgggggctgagattctaattgagaggctcgcaattttggacgcaaagtgcgcgctggcgccgacttttacaacagagacgttcctccatgaacttttgatgcgaaatgtcaatgaccatgccagtgagaagcatgtccccttgctgctcggaaaaggagccattcatcaacagccatacgacctccccatcgggacgaactacacgatattctaagctgatcgttgactccctctgttttatggcgttacgcagccgctactcaatccagggaatatccgagggatgtaccaagtggatcgcttggttatttaatttgttgcggaatgtctcccttgtaaagccatgcagagcatagtagtgatcgttcgcatagatcaaggtaagatcccgatccgttctggcacggaaaattccgcccatcggacattgaacgatggactccaattcagcctgcgcctccatttgaccggtgatgtccaagcataagctgaccagtactgacgcgccattgggtaagaccgtctgtactcctgtctcttttacccagatatagcctttgcctctgcacagcattctatatgccgttgtatagttatttccaacgagaagggcctgtgcgatctctgcctttacattttcgcggtcctctggccgaaggcaattgatcatggctttcccgacagcggcgatgagatccctctggcttggataattcaaaagagacagcatctgttcatcaatgtaatagagggggaagcccggagcattataagtaatcataataccgccgaacatacatttgctcagcaaatccagcattgctttttctatacaatgctcaagctgtctcttctcgtcaggtttatgaacgaagcactgcgaaggggctggcattttcagatcactcttcattcccacataactctcccatatacatattgaatagggctctccttacactgctgttttttgagagacggcacttaatgcagcctgccggatcgtagaggtcaaaactttcatctcagcaaggatctcgttgtatatctccgcacggcatacggacatattattgcataaagctgtctctctctgatgtgagtcctgtttccaccgcagaaacaagactttgagttgattggagctttgggtattgacggggtccagataatgccccgccaatttcgaatccccgcgtgtcagggcaccctcaaaagcgtagcgtatcccgcgctctacctgtgcgaaactggctccgttctgcttggctatctttgcgtataacgcacagatctttccggaaaaatagtagggatctttatccatgagttctaaagcatcgtgaatatatataaacccttttgtattgaccggaatccctgcgcgcagcagagtatccgcgatttcatcgtatatcataataaatatcctttcaatgatagattgcccagccgttcctatgggggccacgtacatttcctggttgacaagcgctgtcttttgctttagtattatcgatatacttaaatacgccgttcgtggtacatatgtccatgtaacacgttcagcacccttagcttacaacaaatatctttgaaagtcgaccaatttttacaaatttcttgttatcctctttttgcgggcaagagatttgtgaggcagaaaatggggattgtagcgtctgataaggaggacctcacatgagcctgggagatagattacggcagaggagacaggaaatgggcctcaccaggccccagctggcggctaaaatatgcgtgactccctcagcgattgccaattacgaaaatggtatcagcaccccgaaacctgatatcctgatttccctaatcaatgtgttggaggtcgatgccaattatatttactccgattatcttggacatagccaagtaagaaatctttatgaccaggacctgaatgcggaagaaattgattctattcaaaaatataaaaagctttcggaagagggaaagcggctcgttcggctgattatcaatgaggaatatgcccgaactattaccaagagtcagcttaccctcccctgctatctgcctggtgtgcgtaagctccacaccggatttctcatgcaaacgaaattgggcagcgcgcacatcatgcaaaaagatctgcctgacggaaccgatttttgctttcaaattcaagtagatcaatatctgcctgtctttcgaaaatttgatattctggcactccagagaagacaggcacggcacaatgagatggggctgttctgtctcaatggcatttactatatccgtacccttttccaggagaagggagagtgccgtcttcgatctctaaatgtaattgatgaggatattttggtgaaagaagcggatgaattccactgtattggtacggtccttggccaagtaaatgccgttttggaaacttaaatgaaccctgctttccgaatgtttttggcgaaaagaaggggtcttcgttgtgaaaagccttggggcttttactttttatgcagatttttgatattagtaagaacttgtaaaatataaatataaaattttgtatttggcctaacactacataaatatagacaatggaagctcaaaaattgcaccgcatagacaagaaaaggcccatcaaaaaggctggcgctctctgcctgccctctacaaacaggtatcccccatctataatggagccatgaggcagctagagggcgggagatatatactgagtggcggcctgtgaggatgagcgtgatgcctaggagcagatctgcgacctgtgccgcgagattctcaccgggtttaagtcggagcacaccatctctgccttgtccagcgccggggagctggccgccgcgctggacggcggggagcggtttgaacttcttattatatatggatatcctgatggaggccggacgggaatggaactggcccgagatccgcgggcagagaatgaacagaccagcatcctcttcatcgccagcagccaggaatgcctcaaggacggctactccgtccgccctatccagtacctctacaaaccggtggaccgggcggagctggctcaggccctggagacaaatctctgtctgcaccaccggccggaccgggtgaccctgcggctgggcagcaagacatcggtgctgccgctggataccctgctctatgccaaaagccagagccacggcacggtggccgcctttcccaacggccagctgcggaagcacagcagtgccgccgccactgccgcgcacagcaggaaaaaagaagcattcatgatcgtattcgcttcacggcgcagtcctcctatcctcttttgtttggtatgattgtaccaagatgctgggcaagtcctcatagttccttctggcagcgacacctataccttctatatttcccttggagccaaccagcgcctgaacacttcgtcaccttctcctggggagggccataagcggcagtgtccaggtggagggcggggcaaaaaacgtgaccctggatggtactttcgcgctggaagtaactgctgaccgcagctccttactgacgaagggcaacgggacctttatggtacaggtctacgacctggaaaacgccccctttgaaaacggcgccgaccgctgggagcatagggtgacggtggaggtggacaatctggcggtctatgccaagaaagcgatggataccgttactaaatagaaaatttcatgccagagaagcagatgggtgtatttcctgtcctgcagctttttataaagtgaagggtgcttcgccctccgaagtcttatctagccttaccagattcccccgcgctgtttgcagctcttgccatcagccacccggtcacagtaccggggggcctttttcattttcggaatgaaatatttccagcactagttacatcgactgacctgctggctgttctgttcggagtaaagtgtcagaaccaacggccgaaaatccagcaaactacgcagccggaacagccgttttttctgcgaaggcaactttgtcgggccacagatccgtacgatatcggcgtaaactgctcgcaaattttcgcactgctcgaccaatatttattttttgttgaaattatattgacaatttgttgagatatcattataattaccccattaccaatgagacacagaaaaggggactgaccatgcgtcaagaggaggcgttcgagtttctctgccgtctggcccaggggattgccagtatgtttggcgacagctgtgaaacggtagtccatgagatggagggtgagcggatgaagaatctggtgattttcaatggtcacgtctccggacgcagcgccggctccacgttgagtatttatggaagggataccatccaggatgacccggaagggaccagtctggatcaggatttcctgaaccagatggtagtgacccccagcgggaagaatatcaaatcctctactttccacctgcggggcgaggggtaccattatgcccttggcatcaactatgatgtctcggtgatgggggcgatgcgccgcctgctggagaactttaccgagtcctctggtagcctattggactctatctcagaggaccgctctgatttggatgccatcttcgatgcctgccaggccaaactggacaagcccatgtctcagatgcgcaagggcgaccgaatggcgctggtggccctgctgaaagagaagggtattttccacctgcagcgcagcgtcccctatgtagccgagcgtatgggtgtatccaaatatacgatttacaactacctcaatgagttggagcacatttaatgaagcagaccataatgctggagaaggggagacgcccatgacaattgtagaggccgcagaagtccgccagcggctgaccatgcctgtgtgtatcgacctgatgcgcaccagcctgcgggagctggaggccgggaattacacccagccgttgcgctccattgccctgctgccaggcggagagaagtttgggtttatgccggcctgtttgggggactgctttggagccaaagtgctttcagcgtttccccagaatgcgggaaccaaatacccatcccacatcggctatgtgctgctatttgagggagaacacggcagcttcctggggatggccgacgcggcggtcattactgagatccgtaccggcgcggtctccggcgttgccaccgacctgctggcccggcccgatgcccaccgcctagccattatcggggcgggagcacaaggacggtctcacttggccgccatgaccgttgtgcgggatatccattccgtgaccgtctatgatcaaaacactcagacggcccgccgctactgtcaggagatggaggaaaaatttggtattccggtcaccgctgcagacagtgtccgggaggcggtatgcgacgctgacatcgtctgcaccgtaacgcccagtcgggagccatatttggagagcgactggatcgcccccggcacccatatcaacgccgtgggcgctttcacgcccaccacccgagaggtcaccagtactctggtggccaaagccagactgtacgccgatcaggtggaggccatgcgcaaggagtgcggtgaatatctggtccccctgcaggaaggactgatcggtccggaccacattgtgggctctctgggcgacgtgctgctggggcgtgtcccaggccggagcagcggggaagagatcactctgtttgacgcactgggcctggccgtggaggatgtggcctgtgtcaagtatctgtgcggcggaagccgcagctgaacggctggccccatgacccgacaacaataaatttatctgaggaagaaggaaaccgccatgaaaaaatgcattgccctgcttctgaccggtgtgatgctgctgggcctcctgtccggctgcaacacctaccaaaatgatgacagcgcctccagcgccggaagcacctcaaacacggcagatggagtcagcgccgacttcaccatggcctacaatggtgtggtgactctgaaccccattatgagccagagctccaacgattttaaccttttctatctgacccagatccagttggtgcgcttctacggcgatgagctgcagtacgacgctgccgagcgttacgaggtcagcgatgactataccgtctacaccttccacctgcgggacggcctgaagtggtcggacggccaggcacttaccgcccacgactttgagtacggcgcctactgtctgctgaatcccgacatgggcagcccggcggcatacagctggtttgccatcaagaacgcctcggcctataattcccgcgagatcaccgattgggccgaggtgggcgtgaaagccctggacgacctgaccctggagatcaccctggagcggccgctcaactcctttgaccgcaccattgctgtgcgcggcctgtaccccctgcgccaggattttgtggagcaggtaggcagtcagcagctgggctcatcgccggagaccatgctgttctccggcccgtacatcatcactgactgggtgctggagagctccatggagctgaaaaagaatgatctctactgggacagtgccaattccttccccacccagaacctgcacttcatcgaggtggaggatgacaacaccaaggtggccatgttcgaaaatggcgaggtggacgccattgagcagatctccagccagtattttggacacctgaatgagtacctgaactcctttgtgggcggcggcattatgttcctgtggatcaatcaacagggtactagtccggagaccgccgcactgttgagcaatcagaactttcgtcaggccctgaactatggcttcgaccgttccgccaccgtcaatgcggtaaaccccggttacaaagcctataaccgactggtggactccaactttgccggtcccgacggcggcaagtttgtggatgagtacccggtggaaacggtgcctctgtccggcgacgtggataaggccaaggagtatctggccgcggccatggaagagttgggctactctgatgtctctcagctgccccagctggagctgatcacctgggatacctcggagcagaagctgctgctggagaccatcatcgaccagtggaagcagaatttgggcctggagaatatccagctgacccagtatgtgattggcactgccattggcagcttctacgacctgagttatgatttgtttgccattacctgggaaactgacgtgctgcccaccgacattatggaggccatggtcactggcggcgaggtcaattacggcatctggagcgatgcccagtttgactccctggtggagcaggccatcaacgagctggagcccgacaagcaggcggagctcaccgcccaggccgagcagatcttcctggacaatgcggccatcctgcccctgtatgaaaacggcgtgaccggcgcagtgcaatcctatgtggagggcttccagatgtccgccaccagctccggttatcagttcaatcacctggtagtacacaagtaaacaagtagttttgcgcagcggggagcgcggcggcttttcaggccccgtctccccgcgtatcgttcttcgaaaggagacccgccttgaaacgatatattctaaagcggctggtgatctcgatcatcaccatctggctcattgccacatgcagcttttttctgctccatgccctgccggggacccccttcggcaccacgcagctgatgagccaagagatgcgggacaagatgatggcctactatgggctagaccgcccgcccctggagcagtacctgacctttctgtccaacctgattcggggtgatttcggctactcgctgaaatatgtagggcagtcggtcaacggcatcattgcccagaccttcccggtgtcggcgcagctggggctgcaggcatatctgctcagcttccccatcgggatctttttcggcattattgccgcccggcggcggggccgtcccctggactatgctctggtgggcttctccgtgctgggcgtgtcggtgccggtatttattctggcatccctgctgcaatatgtatttgccaccgaactggggtggttcccggtggcccagtggaagggctttgcctacaccatcctgcccacactgaccctggccatcggctccatcgccggaaaaacccgcaatatgcgcacgctgatgctggaggtcatttcggaggactacgtcaagactgccaaggccaagggcctctcctctgcccggatcgtctggagccaccagatccgcaacgccatcatccccatgatcccctccctgggcatggagatcgtgaccatcctgatgggatcctttgtggtggagcagatttttgccatcccgggtatcggcgcgtattttgtccaatcgatccagagcctggactacaccatgaccctgggcttaacggtattcttcggtgtgtttgtggtcagcgccaactttgtgatcgatttgatttacggccttgtggacccgcggatccgggttgcgaaatgaggtgcattcaatgaacaaacccgcttcctctctgaccgagcaggattttgtccgtctgcccgctgaccgaagcatggccgacgccatagtgcgccccagtgtcagctactggcgggacgtgctgcgccgtattcggtccgacaaagtcgccatagtcagtctgaccttccttgtcatcatcatcctgatggccatttttgcccccatactttctccttacggctatgagaccaccgatctgctccacaccaaccagcctcccagtgccgagcactggttcggcaccgacgccggaggccgggatctgtggacccgggtctgggtgggggcacggatctccctgattatcggtctgggcggcgccattgtgccccagatcatcggcatctttttgggcggcctgtccggctttttcggcggctgggtggatatgctcatcatgcgcatcattgacgtgggcgtgtgcatcccatcgctggtgtatgtgaccctgattatgctctggctggacgcgggccccgtggccatcatcatcgccattgccattacgggttggatggactcggcccgcgtcgtccggggccggatgctccagtttaaaaaccgggagtttgtcctggctgccagcactctgggggcctcccccatccgcattattttccggcacatcctgcccaatatcctgggccagcaggtggtcaacatctcctctgccatcccggcggccattttcctggaggcatacctgagctttatcggcctgggcatcaaatcccccatgacgtcctggggtcagctgtgtcaggtgggctcggagttttaccgcctctacccctaccagctgtttattcccggcgtgtttatcagcgtgaccattttggcattttatctgttcggcaactgtctgcgcgatgcgctggacccccatctgagggactaaaggaggcgccttatgacgaaccatcttttggacgtgcaggacctgcatgtctcctttgacacccacgtcggcgaagtccgggcggtacggggcgtcagcttctggctggatgcgggtgagacgctgagcattgtgggcgagtccggctgcggcaagtcggtgaccatccaaaccattatgaagctgctgccctcccctccatcccaaatcaagtcgggcgccatcacctaccagggcaccgacatcacccatttgagcgacaaagctatggagtcctaccggggcaaggaattttccatgatttttcaggattctatgaccagcctgaacccaaccatgcgggtgggacggcagatgtgcgagggtattttgcgccatcagagggtgtcccgccaggaggcccagcagatttcggcagagctgctggggcaggtgggcctgcccaacccggagctggtggcaaagcgctacccccataccatgtccggtggtcagcgtcaacgggtcatgattgccatggctatggcctgcaatcccaagattctctttgccgacgagcccaccaccgccctggacgtgacgatgcaggcgcagatcttggatctgatgaaccacctgaaggagaagcgagggacctccatactgctcattacccatgatttgggcgtagtggccaagatggccgaccggatcgccgtgatgtatgcgggcaagatcgtggagtacggcgacgcgcggcaggtattttaccgccccagccacccctatacctgggggcttctgggggccatgcccaacctgatccaggacgtgaagagtgagctgtacgccattcccggcacgccgcccgatctgtatgccccgcccaaggggtgcgcctttgcggcccggtgtccctacgccatggaggcgtgcttgaaggaagatccccaggaatttgcctgcggtcagggccacggctcccgctgctggctgctggacccaagggcacccgatgtaacgccgccggagggcattccgcccctgccgaaaggaggcagtgatcatgtctgatgcaattctccaggtttccaacttggaaaaacacttccgtgtaggccggggcaagatcctgcgggcggtggacaatgtatcctttgccatccagcggggcaagaccctgggactggtgggcgagtccggctgcggcaagaccaccgtgggccgcaccctgctgcgtatctatgagccggacgggggcaccatcgtgtttgacggccaggacatcagtaaggtgacccgggcccaggccaaggccctgactcgaaagatgcagatgatctttcaggacccctacgcctctctgaatccctttttcaccgtaggcgagatcatcgcggagggcctggagctgcataagctttgcgccaatgccaaggagcggcgggagcgggtgtatgagctgctgaacatggtaggcctcagcaaggagcacgccaaccgattcccccatgagttctccggaggccagcgccagcgggtgggtatcgcccgggcgctggcattgaacccggaatttatcgtctgtgatgagcccatctccgccctggatgtgtccatccaggcccaggtggtcaatatgctgatgaagtttcagcgggagctgggacttacttacctgtttattgcccacgatctgtccatggtccgccacatcgccgatgagacggctgtcatgtatctgggcaccatggtggaatacggccctacggaggaggtttacggccatccggcccatccatatacccagggtctgctctcggcagtgccggtggccgacccagactatgaaaagacccaccaccgcatccctatggagggcgaggtgcccagccccatcgaccccaaaccgggctgccgtttctgcggccgttgtccccgggctaccgagcagtgccgcacgcagacgcccgcgcccaaggacctgagcggcggacattttgccgcttgtcatcatctggattaggaggaacactaccaatgaatacaacagaaatggttcaaattgccctggatctggcccaactgcaggaactgcctctggattcctccgtctcggttccaggggagaatatcacccgcgtgctggcgggcattgatatgggcgctgccgagctgactctggcccgccagctgggctatgactgcgtggccaggcaccataacatggtgccccgcctgggtaagctgggagagctggttgcccaaagccactatgagaagctggtacactatggtgtgcccgtcaacgtagcccaaaagctgctggagcaccgcaagcgggctacggagatcatgtttcacggctccaacctggacggggggccgtctgtggcccggctgctggggatgccatatctgggcctgcacacccccgccgacctgctgggcgagcggatggtggaggcgaaggtggacgaggtctatgaagccaatgacaaccccaccgtccaggagatcctggacaatttaatgaccatccgagagtatgcccaagcccccgagggccagcgccctgccatctgggtgggcgaaaaggacagctacgcaggaaagactgtggtggattttgccggcggcctgggggcggagctggacgagctgaaggcgctgatcaccgccggtgtgggtacctttgtctgcatgcacatggacgctgacatcgtcaaagccctgcaggaggacaaccgctgcaacgtgctgtgcatgggtcacatggccagcgactccattggctttaaccagatcctggacgcctgggaagctcggggcgtagaggtcacccgcatcggcgggctggtctgacaggaggcccgccatggcatggactttgattcggggcgggactgtggtagacgggaccggctccccgcccttccaggccgatgtgtgcatccgggacggcgtaatagacgccgtgggccctgacctctccgccccggagggagcccaggtgatggatgccgcagggaaactgattaccccgggatttatcaacatgcactcccattccgattgctccgccgccatgtaccccaatatggagagcacgttgggtcagggcattaccacggaatttgccggacattgcggcctgggggtcgccccagtacagcatagttggctctacatgttcccagagaaaaaggcattcaccaaggtcatgcctgagccgcctgggggtattaacccatacaacgcctatctcgttcccactcagcggctgcgggagccctttgcccagacctacggtcaggagctggactggactacttatggccagttcctggagcatctgcgccgagtggggctgggcgccaacctggctgtggtggccgggcaggcccagatccgcctacaggccatgggcaccgactaccatcgggacgccactgagacggagatcgccgccatggagggcgccctcagcgaggccatggatggcggcgcgctgggactgagtctgggcctggactatgagccgggcctctttgccgggcgggaggaactgctgcgcctgatgaagctggtggctgcccggggcggcatcgtcactgctcacacccgcagccgcagccacccctattatggccatgctcagagcttcctggacggtctgcgggaatttttggacctgggacgggagagcggcgtccgcatccatgtcagccacatacaaaacggctacaacgtcaccccggcccacgacggtttgatccgtgccgccgtggccaagacgctggaggagctggaccgagcccggcaggcgggtgtaaacgtcacctgggatgtgatccccaagtacgcctatggtcccttccactaccctatggccgcctctctgttccaaccctacgtggagcggtgtgggggctgtgccgctttttcccgggcgttgaccctgcctgactttcggcggcaggttgttgaggagatccggaccggacgccatccgtctcagggggtctttacccgctttgatccgcaggccgacccagcctgggacacccgctaccggtttacccgtgtgcagcgggcaggctgtgtaggcaaaacgattcgagaggcagcgcagggggcagacagcctggagctgctgctggatgtgctgaccgaagacccctacgccgctatgatttccctggggcgccgtccggaacatacccccgaccgggacgcctttgtggcccgaacggaggccaccattggtctggatacctggaccttggactacgacgcggccctgtccgagggcgacctgccgctggagtgcggctcgcccgccacatacgaggggatgaccgtgtttctggagacggagcgggacaagggcgctgccatagaagagacgatacgcaagcttaccggcaatgcggcccgcaccctgggcctgaccgaccggggctttgtctcccaaggtctggctgccgatctgttggtactggactgggagcatttctctgccagggaaaatcttgctgatccccgacatggcccgcagggactggactatgtgctggtggccgggcagatcgccgtggaccacggcgtccatacccatgtgcgcagcggcacggttctggggcctgaacatcgaaagggagagaactgagctatgtcttttgactttcaaactctggccgacgccattgactacggcttcggcaccgggttccgaccggactataccgtgatggccggagcacagctgcatgtaaaaaccgccccctgcattatcgacgcgctgaccaggttttctcagagtggtctgtatggttggaccgactccgatgaccccctgtacatccgggctgttgtcaactggatggcaaaggtccgcggctgggagatagaaccttcctggatcgtgccgtcctacgggatccttcaggccatgtgtgcctccatccgcgcctttactcagcccggcgacggcatcattgtgcagcagccggtctatctgctctatgcccgcgccatcgccaactgcggtcggaaattagtggacagtcccctgcaactgcggggtgaccggtatgagatggactttgccgacctggaggagaaaatggccgcaccggaaaacaaactgatgctcctctgtaaccctcataaccccactatggatgtatgggagcgggaggatttggagcgagtggcggctttggcccaaaagcaccatgtgctggtggtggcggacgagatctttgccgagcatgtgtggcagcccggtctgatggttccctatgccgccgttccgaacgcgttggaccactgtatcatctgtaccagtcttggcaaggcgttcaattttaccggtaccagccactccaatgtgatcatccccgatgcggccatccggaaggcctactgcacccagcgggatgccgatcactatggcagcctctctcccttcatgcgggccgcggtgttggcggcctacacagatgagggcaaggcgtggatcgacgaactgatggactttgtgcatgagaacgagtccttggtgcgggactgctttgcccgctgtatgccggcggtgaagcttctgcgccacagagctggtacgctaatttgggcggacttccgcggcttggggctgtcggagctggagctggagcggttcttcttgtccgccggcgtggagcctgacctgggcagcaagtacggcgctgccgggaccggctttttgcgcctgcaaattggaatgccccgctctgagctgaccggagcgcttacccgcttggaagctgccgcccggaaatgcggctttgcccaagaggcgccttacatctaataaaaatagggctctgcacgaaaaaatgtgcagagcccttgttataggcgacgatgatgccggaagacctttgaaaagtggagggaagaggttacttcagtatgtagaaaattaggcgaaaatataaaaggtgtatttcaaccttgcgcctatgggtcagcatttcagataacaaattagaatttgtcaatctttatctttgtcattctttttcttctcgttatagatagcaaccgccactcctatacctattgaaagaattacacaaatcataatcaatccaaagtttggtatcataatttttgcactcctttgtcaaattcttattagcttaataccttttactctgtggtttcatttagttcatcagtagaaatgcaatattgactacaattcccacacacgaaaagataagaccaaaactataaattcatctatatagacataaacatttctttgatgttttactttttattattttatcatccgtgaatgctttctgcaaggcacactggtgaaatcgccggagttggaatcatcaacacctttcttaaacagggacgcattatctagcatattgaaaagggatagatggtgtgatacaataaaaaattatcactaacctcaggctgttgcaagatgtgatggggtaccggaacatctgtacaactatggaaacttacacaaaagcgttaagagaaaagaaattggaaacaattcaagccctaaatggggcgttcaaaatctcgtgaccatactgccccaacggttacgcggtttttgtggtgcagaattccatgaaatcccatgttgcaccgatcttacaccaactcaaaaagaaattatggtgagttttaagaatttatgaaaaagcagaaagcttggaaaccattgcggcgcaaggatttgaaaggatttaagaagaagggggcgacgttgtgtacttaaaagcattggagatccagggcttcaagtcctttccggacaagacggtgctcacctttggggaggacatcaccgccatcgtagggccaaacggcagcggaaaatccaatatctccgacgccatccgctgggtcatgggggagcagtccacccgggccctgcggggagggaagatggaggatgtgatcttcggcggcactgctcagcgccgccagacggggtatgccgaggtgtccctcatcctggacaacaccagccacatctttcccatggatgagagcgaggtcatggtgacccggcggtattaccgctccggggagagcgagtactatatcaaccgccgctccgtccgcctcaaggacgtcaacgagctgttcatggacaccggcttgggccgggagggctactccatcatcggccagggcaagatcgacgagatcctctccgtcaagagcgccgaccgccgggaggtctttgaggaggccgccggcatctctcgctaccgccaccggaaggaggaggcagagcggaagctggcccatacggacgagaacctggtccgggtcaacgacaagatcgccgagctggagctccaggtggagcccctgcgggagcagagtgagcgggccagaaagttcctggtgctgcgggacgagctgaaggggctggaggtctccgtgtggctggataccctggagcggctgcgggccagccacatcaagctggacgccgattatcaggaggctgcccggcagaaggaggaggcccgggtggccctggagcggctgtatgccgccgccgaggccctctccgcccagatgcgggagaaggacgtggaggcggaccggctgcgctttgagagccagagccgggaggccgctgcggcggagctggagagcgctatcgcggtgctgaagaacaatgtgcagaacaacctggacaacgctcagcgcatccgggcggacctggaccagcaggaaggccgggcggacagcctggcgggccagatcggccagcggcaggagcggctggccgagatcgaggacaagctgactcggatgcgggaggagctgcggggcaagagcgagcaggcccaggaggcggcccggtctgccgggacactggcacgggagctggaggaactgcggcagaaggaggccatggagacggccaccgccgccgaggccaaggccctgctctccgccctggcggctgccgctcaggaggtgctggaccgggacgagacggtgcgccaggagctgcgggagctggacagccggctggaggaggggcgcgccgcccagcgtcaggcccggaaggccctggcccaggcggtggaggagcgggacgcggtgcagaacgtcatcagcggctacgccctgcgcctggagtcacgccggaagaaggcggagcaggcccgggagcgccatatgaagctccagatggacgagaatgccctgtcatcccgggtgaagatgctcaccgagatggagaagctccacgagggctactccaaggcggtcaagctggtgatgggggaggcccagcggggaagcctccagcatatccacggtccggtggccgacctgctgaaggtgccggaggagtacaccgtggccattgagaccgcgctggggggtgccatgcagaacctggtggtggaccgggaggaggacggcaaggccgtcatccagtatctgaagcgccgagacgcaggccgggccaccattctgcccctcagctccatccggccgggggagctgagggagggacaggccctccggcgggagcccggcttcgtgggggtgggagatcagctgatctccttccagccccagtaccggaacgtgttttccaacctgctgggccgggtggcggtgatggaggacctggaccacgccatcgcagcggcccggaaatacggctataagttccgcatcgtcaccctggacgggcaggtgctgaaccccggcggctccatgaccggcggctccgccagccgcagtgccggcatcttgagccgtgccaacgagctggagcggctgaacgaacagggccggggcctgcgggagcaactggcccaggccgccaaggcgctggaggaggcggaccgggaggccgccgccgccggctatgagatggagacggcccagagccagctgcgggagtgggaggacgccatcctgaaggctgagggcgaggcggcccactgcgacagcgtggtggccgacctggagcgccagtcgtcgtcccagcgggaggagctggagcagctgaagagccgctctgcccagatcgagtcggacacccggggggccaggagccgcatccaggagctggagggggccgccgctgccctgaagagcgaggcggagggaaaggtcagaggccagacggatctccaggaccggtccgcccgcatcacccgggagctgtccgagctcaccgcctccctggccgccctggaggcggagcaggagaccacggccaagagcctgggtgagctgaagagcctgcgggacgacatggcgggggaccgggagcagaaccaggccctcatcggccagtatgaggagaagaaccgccagttcacccaggagatcggggagaagacagcacgcctccaggagctgcgggcggagaatcaggtccgcagcgaggagatccgcgccctgggcgaggaaaagctggccctggagggacagcgcaaccaggcggacaaagacagcagggccaagaacgacgagctgctggccatggagcgggaggtctccatactggagcagcggaaggtggctgccgctatggaggagaagcagcttttggataagctgtgggagacctacgagctgtcccacgaggcggccaagcagcaccgggtggagatcgaatcggtgcccaaggccagccggcgcatcggggagctgaagcgggccatctccagcctgggctccataaatttgggggccatcgaggagtatcagcgggtcaacgaacgatacacctacctcaccgaccagagagacgatgtccagcgggccaagggggagctggaggagatcatcgcggacatcaccggggagatgaagaccatcttcgcccgggagttccagaccatcgaccaggcattcgggcagaccttcacagagctcttcgggggcggcaaggccacgctggagctggaggacccggaggacatcctcaactgcggcatcgagatcaaagtgcagcccccgggcaaggcgctgaagatcatcaccctgctctccggcggggaaaaggcattcgtggccatcgccctgtatttcgccattttgaaggtccggcccacccccttcgtggtgatggacgagatcgaggccgccctggatgacaacaatgtggcccggttcgcccattacatgcgttccatggcggacaagacccagtttatcgtcatcacccaccggcgcggcactatggaggaggccgacgtcctctacggcgtcaccatgcaggagcagggcgtgagccgtatgctgacgatcaatctcaacgacgtggagaaagagctgaagatccgatgaacttcctttccctgctcctgcatggcgggaccccaggccgggcccagcgaagcgggccggactgggagaggaggcgcaagggagcgggcgagggatgcccggaggggcgtcccgagcagaagcggactttgcaccgacgaaggagcagggcgtgagccgtatgctgacgatcaatctcaacgacgtggagaaagagctgaagatccggtgagatctcattcctccccctgaatgaggacgattttctggatcactgggcctatatcgaccccaatactgcccgctgggcggagaacagatattttacggcatagaaccggggaggatacatttgaaggagaaggaaaagggcgggtggctgcccattgtggggctgatcctgctgatcgcggtcctttttgcgggggtgaagctggtattcgcggggctgggatatgttatcccccaggacgaaggtcccgaagagacagggacttggtaccagatgtacaacgagcagggggaggcggtgcgctacactctgcgggagccgggagagatcgacctgtccgcgccggacatcgcccagtggatggagcaggcggccggagaactggagcagaccccggagacagaagggattgtcttctggctctaccgccaggacaccgacgagtatctgctctatctgccggaccaggaccgttccctgctggagggcgggctgaccgcctccgaagagacggaggaggacagtgaggtgtgcctggtcctgcgggcccgcaccccggagaacagcaagccggtggcgccggaggagacgctgtactgcttcgccactacctccgacagctggaacggaatccgggtccgagtcatcctggacggccgggagcaggaggtccgcaagctgacctccattggagaccggctgtactccacggaggagacctatatcggccgggaccgactggaagggagcgggacatgagccggaggaccctgagatgcctgcgctgcggcgggacgatggagctgctgcggcgggaatttctccagctgggaaagacagggtgggtcctgggagatctggacaacctgctggccggggcgctggatgtggatatcctgtgctgttcagactgcgggaagctggaatttttccggggagagtggtctgagctggaggacccggagggcagcggcatcgcccggatggagtgtcccagctgcggcaggagctatgagctggacagccccaagtgccccttctgcggaaagaagaataccagattgttttaagaaaggatcaaacgtatgggcttttttgacaagctgaaaaagatcaatatttttgccagcttcggttcggagctgaccgacgacttttacgatgagctggaggagtccctgatcctggcggacaccggcatggacaccaccctggagctggtggaggaactgcgccgccgggtgcgggaggagcgcatcaagacggtggaggaggcccggacctgcatgtgccggtgtatcgccgacgccatgcaggtgggcgacccagccctggacctgtccaccaagccttcggtggtactgttcatcggggtgaacggggtgggcaagaccaccaccatcggcaagatcggggcacagctgaagaaggagcggaaaaaggtgctgctgtgcgccgccgacacattccgggccgccgccgcagagcagctgaccatctgggcggaccgctccggcctggagatcatcaggcagcacgagggtgcggacccggcggctgtggtctttgacgctgcctccgccgccaaggcccggaacaccgacgtggtgctggtggataccgccgggcggctgcacaacaaacagaacctgatgaacgagctgaacaagatctcccgggtcatcgaccgggagctgccgggctgcgccaaggagaccctgctggtgctggacgccaccacagggcagaacggactgatccaggccaagcagttccgggaggccgccggcatcaccggcatcgtcctcaccaagctggacggcaccgccaagggggggatcgccatcgccatcgcccgggagctgggcgtgcctgtgaagtacgccggggtaggcgaggggatcgacgacctcagaccctttgacgcgctggagtttgcgcaggcgctcatttgagttagggattaggaattgggagccggccgtcctggcgctcgccgttgtaagaccatgtcatcggcggggcagctgccgcctcagagttaagaaaaattaagagtcatattcatatctatttcaacatttttcctcagcgatatggtaaaataaaatgacgtctcccggaacgggaggggaatacggagggagggcctgccgtgaagcgtatcgggaagatatttctgggcgtgctctgtgccgccgcattggcggcggggggcttttggatcaacgaccgcctctcctacccccttgatcctggaatggacgggctggagggctctttgacgaactggctgaaccgggggatagacgcggtcgatggctatcagccccggctgcatgagccggtcaccctgggagagcggacctacgtccccatggaggtgggggagaagctgggctacgctctgctggagcggagcatcaccggcagatatcggatcgcccacacctcttccggaaacgccccctttcggtgcggtgtgatcgaggagaacggcggaaagcagctgctttttcagggacggaacaccttcggagagatcgacagggtccaaatcacactggacaggggctatgaatatgagctgaagctgccccggaaagaggtctttttcatccacaccggggtggacagccgtatccccaccggacttgcctccgtggagcagatcaccctgtacgacggagaggggcaggacatcaccgaatcatttttcatgagcatgggaggcattcagtaaagaccgcataaaacagaggggccctcagcgggccactcagagaacaggagaggacaagacgatgccgcgtattgacggaagaaaaaacgatgagctccgaactgtggagatcatcctccatatcaacaagtttgccgagggctcctgcctgatccggtgcggaaacacccatgtgctgtgcaccgccagcgtggaggaccggccgccccgccacgtgcccgagggggaggggtgggtcaccgccgagtactccatgctcccccgggccaaccgggagcggtcccgccgggacatctccaagctgaagctgaacggccgctccgccgagatccagcggctcatcggccgtgctctgcgctctgtggtggacatgaagaagctgggaccctggaacatcaccatcgactgtgatgtgctccagggggatggagggacccgtaccgcctccatcaccggcggctttgtggccatgatgctggccttccgaaagatgatggaagcaggccagctggcggagtatccggtcagcggctatgtggccgccgtgtccgccggcattgtggacgatgtgcccctgctggatctgtgctatgaggaggactccgccgccatggtggacctgaactgcgtcatggacgaccagggccgcctcatcgagatccagggcaccggcgaggagcggccttttacgctggatgagcagcgtcagctggtggagctgtgcgagaagggtatccgacggcttcagacggtccagcgggctgtgctggaggggtaactccaaacctgaggaggcggaggccttctactgtcccgactgccgccggattattgtccctgtgccggagatcgagaccaccggacagaagctgaaaaagaagctggatcagatcaggtctgatatagaaaaaaaccgggagaactggcaggagcagaaggcggagcaaaaagaggataaaaagtggaacaaacgaaagggcaaggacccgtgggagtggtaactatgaagctggtactagcaagtaaaaacaagaaaaagctggcggaaatgaacgatatcctgtcccatctgggcgtggaggtctgctctgaggctgaggcgggggtggatgtggaggtggaggagaccggcaccacctttgaagagaattccctgctgaaggccagggcggtcatggaggccagcggtctgcctgccatcgccgacgactccgggctgtgcgtggacgccctcaacggcgcgccgggggtgtactccgcccggtacggagggcctggactggacgacccgggacgggtgcgcctgctgctggagaacatgcggggccagatgccccggacctgccgctttgtatcggtgatcacctgctgcttccccaacggagacgtgctctctgccagaggagaatgtgagggcaccgtggccttcacccccatgggggagggaggcttcggctatgacccggtgttttttgtgccgccgctgaaaaaaacctttgctcagctgacggcggaggagaagaacgccatctcccaccgggggaaggctctggaggcgtttcaggtgaaactgagggagtatctggagaaaagctgacgcccggccccaaatgggagcccagcggagcgggtcccatttggagaggacgagcaacggaatagagcggatgtccgccgggaggcggacggagcggaatggagtttgtgaggacgatggatttgacaagcaaacagcgcgcccagctgcgcggtctggccaacgggatcgacaccatcctgatcgtgggcaaggagggcatcggtgacaatttggtcaagcaggccaacgatgccctggaggcccgggagctgatcaagggcagggtgctggaaaacgccctgatgtcggcccgggaggcggcggaggcgctggcccccctgaccagaagcgaggtggtccaggtgatcgggaccaaatttgttctctaccgccagagccaccggaaggacaaaaaggacaagatcgtgctggtggagggaaagaagagagaaagcgtaccccagagggagccataaaaaacagaattgtctctgaggagcggcagcaagaaggagtgaagcggaagaagggctgagaggaggcttgtctcttgaaacggagaaaatggcgtgcggccctgaccgccctcctgcttctggctgcggtggggggactgctctggtgcttctttccccgctccatgatggagggagagctgtactgtgtgaccctgtgggacggacaggcgagggtagacctgacggaccgggcagaccgggaagctgtgacagagcggatcgcgcgctgccggcgggtctatggcgggaaggtgggcgcctaccaactggataggtaccccttagagctgggcttcagctaccgggggggcagctggtatctgatcgccggaccggagggcgccttcgcctatgacagcggggagcgcttaaactggcgcattctggacggagaacagctgtggcgggatctggcatccgctctcccgtccagctcagagccgggggagcggtgaacttggaaaggaagggtgtctgtatgaaaattgggatctatggagggaccttcaacccaccccacctggggcatctggaggcggcccggacggcggtcaaggtgctggagctggacaagctgatcctgatcccggcggcggtcccgccccacaaggccctgccggaggggacgccggagggcgcccaccgtctggccatgaccgagcggatggcggacgccctatccatgccgaaggtggcggaggtatcccgcatggagctggaccgggagggcaagagctataccgccgataccctccgggccatccgggctcagtacccggacgcccagctgtggctgcttatggggacagacatgttcctcaccctccacctgtggcacgacccggaggtcatcacccagctggcggggatctgcgcctttggcagaacagagcaggacggagaggagctgttcgccccccagagggagctcctctcccagaagtatcaggcccagatcgtcaccatcaccctgccgggactggtggatgtgtcctctacccggctgcgggagctgctggcccggggggagggacaggagtatctgctcccccaggtgtacggctatatcctgatgaaccggctgtacggcacccacgcggacctgaagcggctggagcttccggagctgcgggcctgttcctactccatgatccgggccaagcgggtcccacatgttatgggcgtggaggaggaggcggtgcgcctggccgagcggtggggcggagacgaggggatggcccgccgggccgctatcctccacgactgcaccaagtatctggaactggacgaccagctccgcctgtgccggcagtacggggtggagctggatgagctggaacagcaggcggtgaagctgctccacgccaagacgggggcctgtatcgctcgggacatttttggggaacctgatgaggtgtaccaggccatcttctggcataccacggccaaggcggacatgaccctgctggaaaagatcatctatatcgccgattacatcgagcccaaccgggacttcgagggggtggaggagctgcgccggctggcgtatgaggacctggaccgggccctgctgctgggggtggagaccaccatccaggagatgtgggaccgccggctccccatccacaccaataccctccgggcccgggactggctgagagagcacgggacaaaaacagaggaatgacaagaggaacgagcagatgagcactgagaacagaggacgcagagagcagcatcgggagcggcgctccctgggagagaagtttcaacagtggcggcagcagcgccgggagtggatcgccgggatgacccggggacagcgcatccggcaccgcctgctccaggcggcggtggtcctggccatcgccatcatcgcggtctgggcggtgatgagcgcctggatacgggtgcccaaggtgcctgacccgccgacggccggcccggacaccacccagcagcccggggagggagaggacatccagttcacgggggcagagctgcccaatgtggccaagagcggacggaaggagggctactacaccttcctggtggtggggcgggacgtggccagcggcctgacggacaccatcctcctctttacgttcgacaccaacaacaagagcctgaacgccatcagcctgccacgggacactatgatcaacaccagcgccaagggcggttcgctgaagcggatcaacgtggtgtacaaccgcaaccggggctcctccgacctgccggaggcccagcgggtggagaacggcatgactgccctgaagcaggaggtgagccgcctgaccggcatctaccccgacttctatgtgatggtggagtgggaggccatcggcgagctggtggacgccttgggcggagtgtacttcgacgtcccatttgatatgaactacgacgatccctatcaggacctgcatatccaccaggaggctggctaccggaagctgagcggggaggacgccatggaggtcatccgctggcggaagaacaacggggagccctctccgggcgatgtgggacgtatccagatccagcaggacttcctctccgccgtactggacaagtgcctccagccagcaaccctgctgaaggccccggcactggcccaggtgttcctgaacaacgtgaccaccgacctgacagtgggcaatatcctggccttcgcacagctggctatcggcatggacccggagagcgatgtgaaattttccactatgccctataccggggtcatgtatgacagggcctcactggtgctgccggtggagaaggagctgctggagatcctcaacagcggcatgaacccctatgtggaccagatccagtccagcgacctccagctgatgtacaaaaagagcggcgggggatacggggtcaccaccggcaccctgctggact

SEQ ID NO: 13534 - DNA, 2224 bp, Unknown
  gut microbiota DNA sequence
ctccggccccggccacggcggtaacgccatggtggcccaggactacctggacggctcctatacggagatctaccccaacatcagccgggacgccgagggcatgaagaagctgttcaagcagttctccttccccggcggcatcgccagccacgtggcccccgagacccccggctccatcaatgagggcggcgagctgggctactccctgtcccacgcctttggcgcggtcatggataaccccgacctgatcgccgcctgcgtggtgggcgacggcgaggcggagaccggccccctggccaccgcctggcactccaacaagttcctcaatcccaagacggacggcgcggtgctgcccatcctccacctcaacggctttaagatcgccaaccccaccgtcttctcccgcatctcccacgaagaggcggagatgttcttcaagggctgcggctgggagccccgcttcgtggagggggacgaccccatggtcatgcaccagaagatggccgccgccctggactgggccgtccgggagatccagcgcatccaggagtacgcccgctccaccggcgacgtcacccggccccgctggcccatgatcgtcctgcgctcccccaagggctggaccggccccaaggaggtggacggcaagccgctggagggctgctggcgcgcccatcaggtgcccatcgccgtccacgacggcgcccccggccgcgtccaggagctggagcagtggctgaagagctaccgccccgaggagctgttcgatgagaacggcactctgatccctgagctccaggccctggcccccaaggggaaccgccgcatgggcgccaacccccacgccaacggcggcctgctcctccgggacctgcgcacccccgacttccgggactacgcggtggatgttccccagcccggcgcggtggaggcccaggacatgaccgttatgggcacctatgtccgggacgtgatggagctgaatatggagtcccggaacttccgggtcttcggccccgacgagaccgcctccaaccgcctctcccccgtctttgaggtcaccggccgccgctgggaggaccccatcgacgagcacctggacgagaacctggaccgggacggccgggtcatggactccatgctctccgagcacctgtgccagggctggctggagggctatctgctcaccggccgccacggcttcttcaacagctacgaggccttcatccgcatcgtggactccatggtagcccagcacgccaagtggctgaaggtgtgcaaccagctgccctggcggcagaagatcgcctccctgaactacgtcctctcctccaacgtgtggcagcaggaccacaacggcttcactcaccaggaccccggcttcctggatcacgtggccaacaagaaggcggacgtggtgcgcctctacctgcccccggacgccaactgcctgctcagctgcttcgaccactgcatcaagagccgcaactacgtcaacgtcatggtcgcctccaagcacccccgtccccagtggctgaccatggagcaggccgtcaagcactgcacccagggcatcggcatctggcagtgggcttccaatgaccagggctgtgagcccgacgtggtcatggcctgctgcggcgacacccccactctggagaccctggctgctgtcaccatcctgcgccactacctgcccgacctgaagatccgggtggtcaacgtggtggacctgatgaagctccagccccacaccgagcacccccacggcctcactgacgaggactatgacgccctcttcaccaaggacaagcccatcatcttcgccttccacggctatcccaccctggtgcatgagctgacctaccgccgccgcaacaagaatctgcacgtccgcggctacaaggaggagggcaccatcaccactcccttcgacatgcgggtgcagaacgacatcgaccgcttcgacctggtcatcgacaccgtcaagcgtctgccccagctgggcaacactgcctcctatctcattcaggagatgcaggataagctggtggagcaccgccagtatatcaccacctacggccaggacctgcccgaggtccgggactggaagtggaacgacggcaaggggaactattgatccctcccccatcgcagtccatccgtgcaatgcggaacagggacagggggcggtatgcatcgcataccgccccctatccttttg

SEQ ID NO: 13535 - DNA, 12457 bp, Unknown
  gut microbiota DNA sequence
aaactaacaaatacgtttatatgcatatatagttttttatatctttaaatgttaaaaaaatataaaaaatattaaatttttgaatatagtcggtgaaaaatcttttattattgcggaataaacaaaaaatattcgtcaaaagctaaattttttattttttatgtgagattaaaaagataaaatagacatctagaattttgcatgttaaagttgatttaagaaaggaaatgacctttcctacctgtgtgcacacatataaagatgcgagaggactatcacaccagaacgctaatggccaatagaaatgacagagaaatgtaaggaggtacaaaaatgaaacaaagacgccaactcgcagcccttaccctctcagccgctatgctgatcagcatgacagcttgtggacaaggaactcagccctcaaccagcagtgtcccgtcttcctcctctcagcccagcgcctctcagtcaagcagcgcatcagtgccctcctccccagaaggggaatccgattatccgctgaataatcagggcgggatcgccgcagcagagggaagcgatatcggaacggcggcaacgaccttaagcacacgggatgcttctggatacaacggtgccgtcacctctggaaagcaggaggcttctgaggttggtattgaggtcctgaaggcgggaggaaacgcgatcgatgcctgcgtggccaccgcactggccattggattttttgagccgaacgccagcggacttggcggcggcggatttatgaatatctacctggccgatgagcagaagaacgtggccatcagcagtcagttccctgcacctgaggatatcccgctggactattttgagtacctgctcaatgaggacggcacccgcaaccaggagctttggagtgagttcaattcttccggtaaggcggtatccattatgaaagccctttccacttatcaggtggcgttggacaattgggggaccatgacactctctgagatcattccctatgttactcaggcggccgagcaggggattcgagtgacagagaatctgcacaacctgatcgacagttcctatgaaaaactgtacatgcatgaggcgtcccgagagctctggctgaaggacgggctgactgttcccgaagtgggagatgtcatttacaaccccgatctgatcgatactctaaatctgatcgcagaaaatggaatcgaatatttttatgaaggacccattgcacaggagatcgtggacatcatccaggccgacggcggtgtgatgaacatgaatgatctgaagactgcaatgactgatgttctggtcattgatgatccagttgaggtgacctatcggggctataagctttacagtatgccgctgcccagctctggcggagtgatcgtgggtgaaatcctcaatattcttgagaactttgatctggcttctatggggcacaatactcctgaaagcatccatgtgatctcggaagccatgatgcgcgcgtatgccgaccggggtgcatatttgggcgaccccagctttggcgatatccccattaccggcttgagctctaaagattatgcctactctctttatgagcagattacaggtgaggccacaactgagctggaggccggagacccgatgccttatgagagtgcctccactacgcacatgtctgtcattgataaagatggcaacatggcatgcatgacccagtctattagttcccactttggctgtggcattacggttcccggacgaggcttcctgctgagcaatggtctgaccagcttcgatttggagcagggtaagcccaactctgtggcgccaggcaagctctctctatccagcatgacaccaactattttggtcagccctgaaggagagccggttctgatttctggatctcctggaggtgagcgcattatcgcctgcatggcccagacaattatcaatattgtggattttggaatgaatgcccaggattccgccgatgcaccccgagtctttgctggagcggattgcgtcatccaggtggagggacggatgcctcaggatgtgatcgatgaactggaggctatggggcataccgtaaaggttggttcagactgggacgccaatatgggtagctccaacactattacttataatcctgatactggtgagcttcatgtggccggggacccgagacgggattcgcagggcgtcgcatattgatctttaccagatgtacggattcctgtgcatggaaccggccagggccttctggccttggccggtttttgcaatttcaatgtcaagacatttctgaaaggagaatttaattatgaaaaaggtgctgtcttttgtgctggcgggggcgatggtgctttccttagccgcatgcggagatcctggaagtacctccggtcaggccccgggttccgcagggagctctacccaggtcacagaggtgacagggctgacagaacctattgcggagacccctgccctgatcacctctgcagggcagagtgctgacgcatctatgctcagtgcgattttagagaaggccgggttctcctgtgatattgagacaagcattggggcagacagctttgatacctctgcctataagaccctgatcattggtgtgggcggcagtcagaaggggcttggagccgctggagtggatgccgacgtggagcaggagcgcgtggatgcggtggtagctaaggctgaggaggcggatatgaccatcattgtcgcccatatcggcgggagtgcccgccgcggtgaactgagtgacggcttcatctctgcggtttcccctaaagctgattatctgctggtcgttgctggcggagatgatgatggactttttacccagattgcatcagaaaatggaatccccatggataccgttgaaacattggcggatgtgggtactgtgctcccaaaggcattcaaataattgtgaggtggctgcatcagccccttctgttgaacaagaaggagttgtcatatgtctgaactgctgattttcctgctgatgatcgtcatctttgcgggaagttgtttcttcctgaagctgcctgtgggaattgcattattgctttccacggtgggcggggccctggctggcggctttggagttccggtgaagtttatggtggaaggtaccatgtccttcctagataccattctggtcattgcctgtgcaatgatttttatgaaatgcattcagtattctggtgcccttgatatgctgaatcgattcttccttcgcagattccacaaccataaggtcatcctgctcctgctccttatgctgattatcatgttcccaggtatgatcaccggatcctccaccgcagcggtaatcagcgcaggtgcgattgtctgcccgatcctcatcgcgatggggattcctgcagaaaaagcagcggctattattgcgcttggtggtatgtatggtgccacagctcctccggtcaatattgcagttatgaccattggtggaggtgtagacatcccctatgtggggtttggaattccactgctgcttctctctgtcccactggcaattttttcggtgctggtccttgggctaaaggactgtaaaaatatggactatgagcaggtcaaaattcaactgcagatcagagacgatgaaaagatgtcttttgtcatgctattgcccgtctttgttctgctggcgctgatcctccttccctctatgctgccgaatatcgtcccatctctgagcatgactattgtttttatgatcagtgcactgctctgtatcctgaccgggaaaaaattttcggtttgggcagcgattaaagagggagtgaacagctcactgcctgtcatgggaatcttgatgggggttgggatgtttattgagattatgactatgaccggagttaagggctggctggtcgttaactgccttgctcttcccgatgccttgatttttgtggccattgcggttacaattccgctgtttggagccatctcttctctgggggcagcgtctgtgtttggtgtcccgttcctgctggccctcatgagccgggatacgattgtggttgctgctgcactggcctctattgccagtgtgggtgagctgatgccgcctaccgcccttgctggcatttttgcgtccaaggtcgcgggactggagcaatacaccggtgttctgaagaagtgccttccctctgcgctgctgatcattgcctggagcctactgtttatcatttttgccaacccaatcgcgtcccttctcccctgagaaccgcaaggaggtgtcattgtgacgatcgtaactatcgtatcctggctgatcatggtgtttgtaggagttgtaaccgtattttgcatttttgaagagaaagacatcaaaaagcagatgaatgcggcgctggtcctgctcccaattgtcctgcgtgccctgatgatcaaataggaggagtgccatgaagaaaaattatatttctgcacttgcagtcctggcatgtgtagctgttttctgtactatttctggtaacagctttcaccagatgcggaccgctacagaagagattattcccggagagggcgtgacagaggtccgaatgctcagcgattacttccctgatttagctggtactgccggggatactcagatttatgtgcttcagggggagcaagagggaggcagctgcctgatcctcggcggtacacacgcaaatgagctgggcggtcatatgggagcggtcctgtttgtagaaaatgcaaaagtagaggcaggaacgctgtatgtcattccccgaaccaacaacagtgcctttacgcacaacgacccccaggaagggcatcccagcactgtacatatcaccaccgatgaaggaaacgtccgtgagttcatccatggatcccgggcaacgaatccggtggatcagtggccggacccggatgtctatgtcaactatatgggtcagtccttgtcaggaagtgagaaccgcaacattaaccgtacttacccggggaaggcggatgggacgctaactgagatgatgagctatggtattgtccagctgatcaatacggagaacattgatgttactgtggacctccatgaggccagccctgaatatcctgtcattaatgctttgattgcccatgaacgggccatgaatctggcatcgaatgtggtcgtggacatgcagatggagggagtgcagatatccctggagccctctccgacagatctgcgcggcttgacccaccgtgagcttggcgatcacacggatacgctggcgcttttaatggaagcccccaatcccgcccagggccgcctgcgtgaccgcaccgatgaggcgctcgtcctgacaggcaagtcggagacttatgtgaaggccggtgagattgggcagctctatgtgccctatgacgaaaatggatggcccattgaggtgcgctgtgcccgccatgtgtttggaatagagcgtatcctggccaattacagcgaaatgtatgaggagccgatcattgtcaccgggatgcccagctatgatgaacttgtgaaaaatggaatgggtccctacctcaatgagcctaccacgtgatcaaggcaggatcgacagaaatgaaaaaagaaataaagtggtcgattgcggcagtactccttctgtgcatgggagtagttgtgtactttttgtttttgaggcctgctccggtgtcacatacgacctttttcctggctgaggggcttgcaagtcaaacagagtgtcacatcatggactctgggaaggaggggccgacaattttcctgctggccggcacgcacgggaatgaacccgccggattcaagggtgcggagcagctgctggaacggcttgaaccaaagacgggacgcatcattcttgtaccgcatgccaatcagcaggccattgagttgaaccaaaggaccgcatcggatggcgtggatatgaatcgttcctatcctggcgcagaggatggaaatcccattcaggtcttgtctgcacagattatggagctgatccaaaaatatcagccagtctgtgtggttgatatgcatgagggagtcaatttctacggcgtaaacggcagcatcggaaattctatcgtggtgggacagacacagagcggatttatcaatgctctggatatactggagatggtaaacagccagaatggagattatcctgattttgctctggaaggaaacgcacctgttggaagtctgaactgtacggcatccagggagctggggattgatgcgtttacaatagaaaccagccaaaagctgcccatggaagtgcgggtcagccaacaggttttgattgttacaaatatcctgcagcaatatgggatggagttcaaactgcgcccggagtccgggggataacaaagagcacaggcgtacagagccaattctgtacgcctgtgccttgttgctgtgcatgcttgtttaaagaggattttccgccgcaagagtgaaaaactttgcattttgcattggtttttgctattctaaaaaaagagcccctgttgggaagttttgtgattgtgaggccggtatggggataaaacgattgtctattacttggaatgcggtgagagtcttccaggcgttgggactgatggcagttggattactgacccctctgatttttacagagcggaatttccggatctatgatttgctctatcaggcgatgaatgagctggattccggttttctggcattaggagccattcacctgattgccctgaatacccttcgttctggtcctgactacttggccataacgcttttgatggatgggattagcattcagtggaatggacgggagatcccctttgttaagattccattctgctgcctgttccaaatttcactttaccaggtcgtatatatggtctattccctaagactggacatcggcatgccagctatcttagtgtttatctgcattgaattgctgactcggttttctttccgcctgcattacaagctgatcatcatcaccctgtttctcattaccgtgcaggggctggatgttttgccggtcatgacaaaattgggatttggaaatggtgagatctccactgatatcaaggccatagcgcccattttggacgctgaattgcttctgacttattttgtgctgttgcttctgtgcttttttgccaccgctactgttttaatggggcttctggatctggaacagcagcatttgattcaggcccaccgaaaggcagaacaggatgagctgcagctctaccaggctagaatgaaaaatattgaaatgaggtcgtttcgggagatacagaatttggtccatgacctcaagaccccgcttaccaccattcaggggctggctggactttcggaggagctggtagaggatccaaaactggccaaatatcagaggaggattgtgaatgcgtgtgaccggatgggacagatggtttctgaaattctctatgaggaccgaatgtccctggtcccgacagagcggcttctgcgcctgacgctctcctgcatggcgtcaaaccccttggtttctcgaatttctgtccacaatgagtgtcctgaggttcgggtatatgtgaattccatccgtatggctcgagcattggtaaatctgctggaaaacgcatgtaaagcgattgacccggagaaaggggagatccagctgattgtatcctgctgcagtgggacaacccattgggaagtagtggacaacggtattggcataaacccagagatccttcagcgtatgtggacgcatggctattctgaaagcggctccacaggactggggctcagctttgtgcagcaggtggttgaccttcatcacggaacaatagaggtaaagagcagtcccggagaatatacaaggatcacgatcaccctgcctcaaaataaaggagagcacaatgggaaagaacattttatcaattgatgatgacgaagacatcctctatacaattcaggagatcattcttcatcaaggatggacgcccctgctggcaagaaacttcagagaggccgagcacattctgacgcagtatggaaatggaaggctggatctgatccttgtggactatcacctgcctcagccggacggaatccagattgtccgccgtatgagagaaatggggatcaatgtgccgattgttgtgcttaccattgaagagcagacagcagtcatggagcgttttctagaagctggcgcagatgactatgcagtcaaacccattaaacctgtggatttggtctcccgcatcaatacccatctgcgctaccacgagaaagagcagttttactctgaggcggataagggcatcaaccaatctacattggagatcattgtatcctgcctttcctgttcggaagattatttggacgtaggagtcattcaacggcagacaaatctcaatcccaaaacgatacatcgatatttgcgatatttgattcgtgagcagatggttgaggtcaaaaatacctatggaaaacgggggagacccagagcattttaccgatgggcaggccggaaaagatagagatatcacaaaatcaattggaaacgttcaccattgataacctgcatgcatacatatacaggctggccggcgttgccgaatgccacactgcggaccaggagcaaaggtgcatttttccgcaatttcagccaacgagcctcctcggtggtagcccggcagatctcaacgattttttttgagccgtctatgaccaagtcttttttctcgcgcaggacctggaaaagcgacccgtccagattctcttgcagcaggaaagcatagtccagtggaaaatagctggtctcaattaccataggctcgtcatttacatatctaagccggacaatttttacagtctgggaattctcatccaggccaagactctccagaatactggactttggagcaacgatttccttctgcaacagcctggcgcctggtttaagcccgcgtgcaagacaggattcagagaagccttgaatatgtgtataatcccggccatatttaggggaagtcacaaaggtgcccttcccctgtttcttttcaataagtccctgagctgccaattcatccatcgcttttcgtgcggtgatgacgctgacctggtaatatttcgccatttcgacttcggggagcagtctatctccgggcttcaatattccggaggtaatttctttctgcagcttttccatcaactgcctgtatagtggaacgacagcattggcctccaaaatcggtttgctcatggataattacctcctatatactcggtaatcatattataacgactgttttggattctgacaactgatttccagtgtgataggattaaatattttcttgaaagtatagctttttacaaatagaagagtttcttcatttttgcaaggcatcagaaatagcgagcggagtggtgggtgagggggtgtaaagagatttttttagtacgtattgttatatctcgttggtcccttcacagcactcttaaactagcataggaaaatatgattaggcaaaatccgagaaagacggcaaggaaaggcatctagagcagttataatatacggaaaagtatgctgaaaatttaattgcttttcccaaaatgtaattttaggatttaatgtatatgggctctcgttgctggtaagggagggacggacgcttgacaccgggggcgtgacatgccataatgaaaagaccttgaggaagaaggagagcataaggaggaaagcaccatggcaaatatggtaaagcggatcggcatcctgaccagcggaggagacgcccccggcatgaatgcggcggtgcgggcggtggtccgcaccgcgcttggcaagggcattgagtgcgtgggcatccgccggggctggaatgggctcatcaacagcgacttttttccaatggacagtgacagcgtcagccacatcctggaccggggcggaacgattctgttcaccgcccgcagtgaggagtttataaacgaaggaggccggaagaaggcggtggccacctgtaagctgctgggtctggatggcatcgtggccatcggcggcgacggcaccttccggggcgcgctggagctgtcccggatgggcatcccggtggtagggatcccggccaccatcgacaacgacatcggctgctccaactacaccatcggctttgacactgcctgcaacactgccatcgagtgcatcgacaagctgcgggacactatgcagtctcacgagcgctgctcggtggtggaggtgatgggccgccatgcgggctatctggccctctatgtgggcattgcggtgggtgctaccgccgtactgatccccgagcgggatgtggactttgagaaggacgtggtggagcgtatccgggagtcccgtctggcaggcaacacccactttatgatcgtggtggccgagggtgcgggcagcgccgtagagatcggcaagcgcattcaggagacggtgggcatcgatccccgggtcaccgtgctgggacacatccagcggggcggctctcctacggcgcgggaccgggagacggccagccggatgggctatgctgcggtcaaggccttggcagaaggccggatgaactgcatcgtgggcaccaacgagggacatctggtggagatccccattgagaaggcgctgaacatgaccaagcacctccagatggagcgctacgaagtgctggaagccatgcacaatcaggtcccgctgaagtgcgggccgatccagtgacaagaggagaaagcaggcggcagatctttgatctgccgcctgcttttgcatgagatcagggaaaacggaaaaaataattcacagtctcatggtgttgtccctggggggaagtctctctttacggtttctgtccctgcgggatgggaacaaaccgtaggggtgaggtgaaaataatgccatggacgggttgacaatccaaactgtaaatattgtaattacagtataagacaaaaactgacacgactacaaaggaggaaacgatcatgttggagctgaatttaaacaattttcaggctgaggcgctggaggctgaccagccggtgctggtggatttttgggccccctggtgcggctactgccgccggctgggccccgcagtggagcagctggagcaggaactggcggggcgggtgacagtggccaagctgaacgtggacgacgctcaggtgctggcgcagaaatatgaagtggagaccatccccaccctgatcctgttccggggagggcaggccagcgagcagctcatcaacccggcctccaaagcggcgatcctggagtggctgaaggggcagggcgcgatagaggattgaggagccctgcctgcacagaaatgagaggagggtcacaaggtggaacagaagctctatgatgtagcgattatcggcggagggccggggggatataccgctgggctgtactgcgcccgcagcggattttcagtggtggtgctggagaagctgtcccccgggggacagatggcaaccaccggacaggtggacaactacccagggttcgaagggggagtggatggcttcgagctgggggagaagatgcagcggggtgcggagcgcttcggggtggagacccgcttcgccgaggtgaccggtgtggagctggctgcggttcccaaggtcatccagaccagtgagggggaggtgcgggccagagctgtggtgctggccaccggggcctctccacgggagatgggactgcccggggagcgggagctgcggggccggggggtggcgtactgcgccacctgcgacggcatgatgtaccgaaataaaacagtggcggtactgggtggagggaacagcgctgtggcggacgcactctacctgtccaagctgtgcagagaggtctatctgattcatcgccgggataccctgcgggcctcgaaggtgtacatggacgcgttgaaggacagcggtatccagatcctgtggaacagccgggcagtggggctcctgcgggataagcgggtgagcggcctggtactggaggatgtgaggacctgggcacggcgggagctggcctgtgagggcatctttgtggccattggccgggtcccggatacagagctcttccgggggcaggtggaactggacgagcaggggtatatcaaggctgacgagacgacccgcaccgggctgccgggggtcttcgccgtgggggatgtgcggaccaagcccctgcggcagatcgtgaccgccacggcggacggggcgacggcctcccattttatcgaacaatacctcatggaagaaaacagataaaaagcaggcaggagcccccacggttttccgtgggggctcctgcccttatcctttcccaataggagggggtgtcacatagaggacagcagcccctccagctcctcctttgagaagtggtagaccttg

SEQ ID NO: 13536 - DNA, 934 bp, Unknown
  gut microbiota DNA sequence
atagagctggattggctccttggtgctctccggattgttgactcaaataatcttaaatgtcatactgctccacggaaaaaaccaggcggcccaaggaattgggccgcctggtgctattcgtatttttgactaatttattgtagtatggtataatattatctcattgaattgctccgggcgtgcccggggacaggaggctaccgcatgaaactcatggtcattgacggcaattccctcatcaaccgggccttttacggtatacggatgcttaccaccaaggacgggcagcccaccaacgccgtctatggctttgtcaacatcctgctcaagctgctggacgaggagaagcccgacgccctgtgcgtcacattcgaccggaaggcccccaccttccgccacctggcctacgagggctacaaggcgcagcggaaggggatgcccgacgagctggccgcccagcttcccgtgctcaaggatgtgctggccgccatgaatatcccccgctacgagctggacggctgggaggccgacgatctgatcggcaccatcgccgccagggataccgccgccgggtgggaaaccgtgatcgtcaccggcgacaaggactcactccagctggtcacggacagcacccgggtcaagctggtgtccacccgtatgggacagactactacgaaggagatgaccccggagacctttcgggaggcctacggcttcgaccccgtccacatcgtggacttgaaggcgctgatgggggacaccagcgacaacattccaggcgtcaagggcattggggaaaagacggccatggacctgattcagcgctaccagagcgtggaggccatctacgccgacgtggagggcgtggaggccaagcccgcggtcaagaaaaagctgaccgagggggaagaacaggccagaatgtcctatgatc

SEQ ID NO: 13537 - DNA, 45802 bp, Unknown
  gut microbiota DNA sequence
agcagaccggctgatctctgcggccgcagctgaaaatggaacagaagcggggggccgagccatcggccccccgcttttacaagatctgtgtcccctccgctggtttttcttgctttttttcggaaaaagaggtacactgaaacaaaggcagagtaggggcatgcatgctggtcccaaaggggaccgtgtagtgccggcgggacggggagttgtccgccggacgaacagcgcagacgcgcggcagtgcatgatcccgcatcccgctgccgcataccggggcgggacctccgcttcctctgtgcggcaatcccgaaagggctgccggatcgcagaaggaggcgttttctttatgtatcgagaccaatgttccaagaccctgtaccgcaccccgctccagcccggctggtggctggaggggaatcaggccatgaaaagcctgaagctgctgatgttcgcggcactgatggtggcgatggcccgggcgctgtccctcatccccggcatccccatcgcccacaccaagatgacctggggctttctggcccgggcgctgtgcgccctggtctgcgggccggtgatgggactggtgttcggctttgtggaggatatcctgggctttatcctccagcccaccggggatttcttccctggctacaccctgtctaccatggcaggggtgctggtctatgccctgtgcttttaccgggcgcggatcacggtgctgcgcatcgtgctggccaacctggtggtgaacctgctggtcaacgccctgatgggctccctgtggaacctgatgctccggggcggggtctactgggggtggttcttgcccagcctgggcaagaacctggtgaccgtcctgcccaagaccctggtgatatatgtactgttccaggcgctgctgcccatcctccagcagatgggggtcatccccagacagctggatgagaaggggcggctccccctgatctgagagaacggacaaaaggcggacagagaggaggagagggctgtgcgggtgctggcaacggcggcgggctccttctctctggccgtctttgccgccaactgcatcccgctgctggagggggcgctgctcccgctgagctgtgccctggcggcgctgtgcgccgtggccctcctgtgcctccgtgggcgggcacgagtaagaggggccctgatctgcggcgggctggccctgggactgctgtggacggcggcctatggggcggtgttttatgccccggcccgagcgctggacgacaggaccatccggctgtccggcacggtgatggagtacccccaggagaccgactacggctggtcagtgctggtccgggcggacggggagccgggggccccggtgcccacgctggtctatgcggacgaacagggggcggacctgcggccaggggaccgggtggagacggtggcccactgcaccctggcagagcggaccttcggcggggaggagatcacctactacaccgcaaagggcatctttctgcgggcggaggcttacggcgaactgcgggtgacgcggccggagcggctcccgctgcggtatctcccggcggagctggcccaccagctcaaacagggggtggacgccgccttcccagaggatgcggcgcccctgatccgggcactgaccaccgggaaccgggacaacctcaccgaccactacacctcctcccttcagcgaaccggcctgtcccacacggtggcggtgtccgggatgcacctgtccttcctggccgccctggtctccggcctgctgggccggggaaagcggcgctccgccctggtcacctgcggggtggtgctggtctttacgctcatttccggctgcacgccctcagtggtgcgggcggcggtgatgctgatcctgctgcaactggccgccctgctggggcgggagcgggacccgctgacggccctcgccctggccttgatgctcctgctggcctggaaccccttttccgcagcccatatcggacttcagctctcctttgcatcggtggcgggcatcctgcttttttcagaccggctccaggagcggatgctgcgggggtggaagcggccgcccaaggactccatcccgctccggctgctgggggcgctggtccgcttcggggcggcggccctgtccgccaccctgggggccatggtgttcaccacgccgttgacggccctctatttcgggagcctgtccctgatctcccccctggctaatctgatgaccctgtgggccgtgtctgcggccttcagcggcgggctgatcgctggagcggcgggggcagtgctgccggaactgggcagggtgctggccctcccggtgctcccctttgtccgctatctggactgggtggtgccccggctggcccgggcccccttctcggcactgagcaccagctccttctactatctggcctggctgctgttcgtctatgtcctgctgctcctggggctgctgtaccgggggaagaagggatggaagacccctgtctgtgcctgtctggctgcgctgtgtgccagcctgctgttccacgcccggagctttcaggcgggggatatgacggcggcggtgctggatgtggggcaggggcagagcgtcctgattcggctgggggaccactacaccctggtggactgcggcggggacggaccggacgaccccggggacacggcagcggactgccttcaggggctggggcgggaccggctggatctgctggtgctcacccacttccacgacgaccacgccaacggcgtgcccgagctgctggagcggctgtcggtgtccgccatcgccctgccggacgtggaggaggacagccccctgcggcgggagatcctgacgctggcggaggagaagggcattccgctgtggtgggtccgccgggataccacagtggagctggagaaggggcagctgacgctgtatccccctctgggagcgggagaggccaacgagctggggctgtccgtgctggctggcgccggcggactggacctgctggtcaccggagatatgagcggggatgtggagggcatgctggtggagcacgcggggctccgggacgtggagctgctggtggcaggccaccacgggtcggcctcctccacctctcaggccctgctgaacgcccttcagccggagactgccatcctctcagtggggcgggacaacgcctacgggcacccggccccggagacgctggaacggctggagcgcgcgggtgcggagatctatcgcaccgaccgggacggcaccgtgaccgtgaggacccggtgagcgtacaaagaaaagacggagggaatgctatgccgcccaaacagaaggccgatacggccggatatcagcagctgaaaaaggatctggtcgggggagagccggggaggctctatcttttccacggggaggagacctatctgagggaccactacctggggcggctgaaggagctgctgctcaccggggggatgggggaattcaacctccatactatcccggcgcgggagatgtccccccgccgcctggaggaggcggtggactgcctgcccatgatggcgccccggaccctggtgctggtacgggattttgacctgttcaaggcgggggagaaggaccgggaggagtatgcacgggcctttgcccagctcccggactactgctgcctggtctttgtctatgacctgatcccctacaagggggatgccaggaccaagctggcggcggccatcaagcagaacgggacggtggtcaacttcgcacggcaggaccagggggacctggtggactgggtgcgccggcgcttccgggcgctgggcaaggagatcgacacccggctggcctgcgatttgatcttcctgtgcggggacctgatgacaaatctgattggggagatcgagaagatcggggcatatgccaagggcgggcggatcacccgggaggacatcgacgcggtggccaccccccagctggacgcggtggtgttccgcatgacggacgccatcggcgaggggaacttcgaccgggcggcctcggtgctgggggagctgtaccagatgcaggagccgcccatccgcatcatgtggtctctgggccggcagatgcgccagctctactccgcccggctggccatcgagaaggggaagggggccccctatgtggcggggctgtgggggctgaagccctacccggcggacaagctgatgacctcggcccgccggttctccctgagctggtgccggcgggcggtggtccgctgcggccagacggacctggccatgaagtccaccggacaggacgcccaggagctgctgaccggcctgctgctggagctggcggctccgtcacggccggcggggcggcagggggcccggggctgagaacggtccgcaggcgaatgagaggaggagaggagattgcttcacatccgggaggctgtcgtggtggagggccggtatgacaaaaacgcgctgtcccaggtggtggataccctgatcctggagacggcgggtttcggtatcttcaaggaccgggaccagatggccctgctgcgccgggccgccgagcgccgggggctgatcgtgcttaccgactccgacggggcgggctttgtgatccgaagccggatcaagagctgtatcccggggcagtatctgaagcatgcctatatcccggacgtgtacggcaaggagcggcggaagaagcagaggggccgggagggcaaactgggagtggaggggatgccgccccaggtgctgatccagtccctccgacgggcgggggccaccttcctggaggagggagggacgtgcgccccgtcgccggggctcaccaaggcggacctgtacgcggcggggctgtcaggccgccccgacagcggcgcccggcgcctggccctgctgcgccggctggagctgccggagcacctcaccgccaacggccttctggcggtgctgaatgcctgctacggggccggggaggcggaggagattctgttttccgaggcccccgcggcggccggccgggagacggaagaaaagaaagaaaaaatttttccaaaaaccccttgacaattccgcacaatttgctataataacgttcgtgctcgcgagagctacaaagaaatagcgggattgtgtaagggtagcacgacagactctgactctgtttgtgagggttcgaatccttctcccgctgccaaaacaaaatgcgacttgtttcaacaagtcgcattttgttttggggtttgcttccgttgaccgggccctccttcggtatttttgatgcgtgagggtagcgaagccgtccctgcgcattctccgccgctgacgcagttccggatttacggcgcaaaagcgccgccggccagatagccggtcgggaattgctcaggtaaactgcaaacagcccaggggttttgaatcctcgtatcctgccaaaaagaaaggcatctgcttttgcagatgcctttctttttggagcctgccgcccagctccgtgcaagagccgccatgagggtgattttgggcttgagctgagacagagggggtatgttttttatccggacacctttgacggagccgttcagccgggaggggcggcctcccgcaatggagaagccgcccctcctgacttgagaaaagatagagaagtcaaacatgaaattttatgaaaagcagggcaggtcaggcggattcgccgccgtcaagaagctggtacagtgtgtcataaagagcgtcgttgcccacggccgcctttgcgctctctactgcgggagcggctgcggtctgcatatcggttaaaaactcatcggtgatctcacagacctgcatcccatgttcctggaccagactgtcataataatattgctccattgcaatgcatacgtcgtagtcataagcgctcatatcctcgcagatcgcagtcaggagatcctgataggactggggcatggaatagaacttatctttgttcatggtcagatccatgctgggagtcatatggtgtgtagggacaaggtactcctgcacctcatacagggcgctgctaagggcgttggagaggttgttgtcctgcgcatcgactgttccgttctgaagagccatgtagagttcattgaaagccatgggagtcgggttggcacccaatgcattccagaccgccatccggctctccacctgagcggtgcggatcttcagccccttcaggtcctccatgctggtgacgggtttgttggaggtaagattcatgctgtcggtgccggcgcggagcatcaggcacaccagtccgccgtcttcgtttgcctgattgtacaggtcgcggaatttgctgtctgtaaggacgctctcaattttttcgctatcgtatcctgagaagagaaatggaatgtcaaaaataacagtttcaggaacgaaagtggcgtgagtagatccacactgaagcaccatatccatgtctccggctacacaggaggcgatcatttcagagtcgctgcccagctgggaattgggatatatggtgatcgtgatttttccatcactatacttttccactgcgtctttcagggccagaagcattttgtggctctctgtggattcctgcatcgcatggccgatggacagtgaataggcaggaccatcctcggggagctttggataatctccagacagataagaggcggcatcgaattgggcggcgggggattccaccgcagaggaggaagcaggagcattggaactggtggaagtcccggtgccgccgcaggaggccagaccgagagtcaaggtacacgccagggcaagagagagtagctttttcatcgtgatcgctcctttttaatatttgacatatatggtttttacaaaagacacagactgatttggggaataaaagtgatgaacatcagggcaatcaggaatgtaatgatgaacgggaccgctttccggcccaagcgcatgggcggtgtgtcacacaaggggctggcgacaaacagggtaacgccaaacggaggggtcacaaatccaactgccatattgacgaccatgatgataccgaggtggatcacatcgatgttaagttctgtggccagcgggatcagcatgggggctaggatcagcagggcgggaccggtgtccatgaccatgccgatcaaaagcagagctacattgatgatgagcaggatctcgacctttgaatggaaattgctcgtgataaactgtgccagaatggtggggatctgcaggatcgtcaggacccgtccaaacgcagtggccacagccatcatcagcgcaaggggggccagagcacggcaggattctcccacgagccaaaagatttttcgtacctctacggtcttataaataaatacagacacgatcaatgcatagatcacggacacacaggcgacctcagtagtggtgactacgccggagtagatcccgcccagcaaaatgaccggggtcagcagtgcccagaagctgtccttcaacagggggagaaaccccatctcacggagctgaaccagtttggcatcgatccgatttcgatcctcaccttttcggatacagtagaataccgcataggccatcaggcagacggcgatcagaattccggggacaatgccggcgatgaacagcttgccgatggaggctccagtggccattccatacataataaagggaatactgggcgggatgatgacacccagaccggcggcggtagctaccaccgcaccggaaaactctttatcgtatcccagagagagaaggactggaatggtcatggcacctactgcggcgcaggttgcggtgccggaaccggagatcgcaccatagaacaggcaggtagcgatgacggcacaggggatcccaccgggaacatgtcccagcaaataggcaaagacattgaagattttttccgaaatgccgccctttgccatgatgatgccggagaggatgaacaggggagcggccaggatgctggtactgtcacctccaccaatgatgcttcggagcacgaactgtatgttgccggcaaaatcagggtcaatgagtccgggggccacagtggcaccgatgagggtcaaaaccagagggaatcccatcaggatgcctacaacaaaaacaacgacaacagctaagatcatgccataccctcctcagcaggggattttttcagtcccagaataaacagtaccagccgctggatatagcggaccgtgccaagaccgtagccgactacgctggcggcatagacatactgcatggggagcttcagcgcaacactggcttccccggtctccataacacctgccacggtgccgaaagagtggtaaaacaggaaaccggccaccatgatgcagaggatcagattgatgatttcaatgatatttctgcatccttggggaagcatgccgatcaaagcgtctacccgcaagtcagaaccaaggcgtgcgctgtatgaaaatgcgacaaacatcatccaaatgaaacagtagcggcagaactcttctgaccagctcagggaatcgttgaaaatatatctgcgaatgatttgaaaaagcatgatgaccacaatgctgctcagcaggagcaccatgataaactcttccaggtgcttgtccaagaattttagtgtcttcatctgcgtaccggtccccctatcgtttgatttcggcatcccacaaaatggactattgttgctcaaaggatcttgtaataatcatttatctgtgattttgcatacatagcttccacctgctcgggagtcatggcaagaaacgtctggtagcgggtccgcagctcgttaagaaagcggtgccactctcccgggtccagaaacgcgtccttgtctccctggcacagcctggcgtatttctggtaggtgtcgttgtggaaagggtggttgcccagcatcagatccacaggctcgtcccacactttatcgatggaagtgagaaaatcctgctggagagagaggggcatcccattgcgccgcagtgccgcctcggagacgctgacaaagccagccccgccgtagatccccacgcggatggtgtcctggccgtcctgaagcgtccagaagtgggacatcactccgatggtgtggcccggcgtgaggacacagcggatcgtggtgttgcccagctggatcaggtccccatcctggagctccacatccggcacaaagctctcattgtaatatcccagctcccggttcatggcctccatgcgctccggatgctcccgcatgtcttttgcgtctaccgcacttaggaaggtttttgccccagacagatggaccagggcgttgacgcaggcgtagtgatccgtatgggcgtgggacacgatgatatatttcaggtcctcgggattgaagcccagcttccagatgttgtggatcaggccgggcatgctgccggcgcatggagtatccagcaggatcagtccctccccggtatcgatcaggtgggaggagcaccagagatttcccacaaagtacagattgccccggatttgaaagggcgcgcgatccatcagatatggccgatgcatatattcctgtgtaggcgacatattgccgaaacggttaaaatgttccaaaggacgacctcctttattttgagatttggccacatctcattgtcagttcttataataaaagtggttgaccaacttgtcaatttagtctaaaatatagtactatattaaaaacggaataatggagggtgcggagtggacattcggaacatcgagtattttctgcatctggccaaatacgagcatgtctccgccacggcggatctgctccatatctcccagccgtctctgagcaagcacatcacctctctggagcgggagatcggcgtcaagctgtttgaccggatcggcaaccgcattgtgctgaacaagaccggggagcagtttgcccaatatgcaaagcaggcggtggagctgctcaatgcgggggtcaattctgctaaacgggggatctatgacaccaaggggggcattcagatcgcttatacttcctatgcccccattatcgcggactgtgtcgcccagtacacccagatcaatcccctgatcacgttccagatcatcgcgtttgaggccacaaaaatggtggattcggatcaactggactttcttctgtcctcttctgcgggagatacgctccacgaccagaacaagactttttgggtctctcgtcccctctttcaggagcgttatgcactgatctatgggaacagattggccaacgcgctgggagccggtccggcggatctctccctgctcaaagacgagtattttgtcaccatggcccagaatgaccggaaggatgttttgttcagcgacatcacctttcccttgtgtatgaacgcgggatattttccaaaagtgtactgcaagacagatgagttcctggtcaaagtcaagctggtccaatctgatctcgctgtggcggtgctcccagagtcctgcctggaggacgcccttgccattgcgcccggcctccagtattcggtgctggaagacgagatggcaaaacgaaccatccatatcatgcgtcataaaaaaagcctcatgacagaggcggcgttggatttttgggagtttatcctggacttttacggcctgccgcaggatgacttggactaaacagaggtgcaggaaggatacaagagaaaggatgtagttgagatgcagacacttagacgcagagaccagcttttggtggggtttacgctgttttccatgttttttggggcgggcaatctgatctttcctcctcagctgggggcacaggccggcgtggacacctggccggccatggcaggactggcggtgagtgctgtgggacttcccattctgggtgtgatcgcagtggtgcggtcgggaagcctgacacggctggcgggcagggtccatcccgtctttgccacggtgtttaccattttgatctacctctccataggcccctgccttgctatccccaggacggccagcacctcctttgagatggccgtgccccccttcctgccggagggaacgccgctgatctggttccggctgggctactccgccctgtttttcggagcggcctttttggtggccctccggccggaaaagctgaccagccgcctggggaggctgctgtgcccgctgctgctggcgctggtggctgtgatgttcctgggatgcctgatccaccctgtggggggctatggtcccgcgctgcccccctatgacagcgcggctccggtggagggcttcctcaccggctatcagacgatggacaccattgcggccctgaacttcggcatcgtgatcgtaatgaatatccgggcgctgggggtgacggaggagaaggccgttctccgcagcaccgtccgggcaggcggagtggcggcggtgctgttcctgtcagtctactccatgctggcccatatcggggcgctgtccggcggtgcctttcccgggaccaccaacggggccgctaccatgaccaatctggtgggagccatcttcggcccctggggcagagcgatcctggcagctgtctttgtcatcgcctgcttcaacacctgcgtgggcctgctcagctcgtgcagcacctacttccacaccctgctccccaggttccccgcgtctgcctgggcggcttttttcgccctgctcagcatggtgatcgccaacgcaggactggaccagatcctggagttctccgtcccggtgctgaatattctgtatccgccggccattgtgctgatcctgctctcctttctgccggagcggctgcagcggctgcgggtcatctatccggcgggcatcctgtttactggagcggccagcatcctgtacacggtacagggactgggggcagctgttccagtcctggacggggtgctttccgccgtccccctggcggaggtgggcctgggatgggtcctgcctgccctggccggcgtcctgctgggagctgtcctctccctccaaagggaaagcaaggaagtccgatgagacgggggaggacacagagaggaggaatgaggggtgcagaccatcgacgaggcgctggagaagcttcaggcgtcccccttccgggcgaaattccggctctcagagcgggagcgggcctatataggggagaaggggctggacaccattcgggagcacgcccgggggttcattgagacccggctggctccggcggagctgcccaacgacgggcggcagacccccatgcggggacacccggtgttcctcgcccagcacgcctgtgcctgctgctgccgcaagtgcctgtacaagtggtataagatcccgccgggcatccagctgaaccggcggcagcaggagaagatcgtgaatctgctgatggcctggatccagcggcagctgtgaccgggctgcggaggagacagagaggagcgcacagcgatgacagaagtagtggcggccctgatctgggagggggagaccttcctcatctgccagcgcccggcccacaaggcccgggggctgctttgggagttcgtgggcggaaaggtggagccgggggagacccgggaggaggccctggtccgggagtgccgggaggagctggacatccgggtggcggtgggggagcccttcatggaggtcatccacgcctatcccgaccttaccgtccacttgaccctgtttcatgcctccatcgcggagggaacgccccgaaagctggagcatcaggacatccggtggatccgggcggcagagatcccgcagtatagattctgccccgcagacgaggccatcctggagcggctgcgggaagtggccggatgcggcggtcccacacaggttggaagataagacaaggccagcgcctgaatggcgctggccttgatgcgtcgggagtacggctccgccatatgacagacggggtcctcacaggggatcagaactacagaagggcagggggacaggacccatgcccttctcatcttatcctgtcttgcttccggtcggggtcggtcatccccgcgtctctgcgctccgcccactactctgggaagaacgagggaccttttgcagctccagccgcctgcccagccgagagagaagctcattggtgatggtgccgcatcgggcggccagctcctcggcccggagctcctgcgctccgtcccggccgatgagggtgaccacatccccggcctggacaccgggcagggcggtgacatccaccagcagctggtccatgcacatccgtcccgccatgggacagaaagcgccgcggatcagcacacgcccgccctgctggggcagctggcggggcaggccgtcggcgtagccgatggtgaccactgcaagccgggtctcctggcgggcatggaaggccagcccatacccggcccgctccccggggcgcagggtgcgcaccgaggccacccgggcccggagggagaggacgggcttcaggtccaggcggcgctggaccggggagagggagctgtacacaccgtacagggcgatgccggcccgggcccaggcgcatggctggggcggcagattgaggaccccgtagctggcctggatgtggacgcggcccggagagaggttttgggtgcgcatccagtccagcgtgtcatagaacagggtgagctgttccagagtcgcgtccatgtcctcttttttcaggctgtcggagacgcacagatgggagaacaccccgtcgatgcgcagatttttcagacggtacatccgggcgatggcggagcggtccccggcgggcagccccagccggtgcatgccggtatccagggccaggtggacccggacgagtcctccctgggcggcaagcgcccggccgtgagcctcgtcggccaccgtctgggtgagatgccagcggcggaggagggggacctcacggggcggggtgtagcccagaatgaggatggtgcccagcaccccggccttccgaagggcgatgccctcagccagacaggccaccccgaaggcccgcaccccgtcccgccgcaggcagcgggccaccggcaccgccccgtggccgtagccgtccgctttgaccaccgccatcagcgtgcagccgggggacagggcggagcggagggtgcgggcgttgtgccgcagggcgtccaggtccagctccttccaggcccggccgccgggggcggggcggagggggcgcagggcgtccagcaccagggcggcgcacagggtgagcgccgccacggcgcagaagtgggccaggctgttctggatgagcagggcctccagccctgtcagctttgcagcgccccgcaccagcacgatgctccaggggtggaggaggtagatcagcagggacagcctgcgggcggtgcggtcctgcccccggccgccatttagcagcagggagaacaggaagagcatggtcagggggaggaaaagatacatgctgtcgtggcggggccagccctgggcgcggagccagaacgcctccagggacataccggccagggagagaagggtgcccagggcggagatcccccggcccagccggactcccgccgcccccagaagcaggaaaaggggggccaggaacagcccgttccgggtataggagcacaggcggaacagcccgccatagagggcgtccagggcgggcagctgggcggtcaggccgtagtagctgtccccgcccaggccgatcaggtagaggagcagggcagccgccagggcggcgggcagccccagccgggccaggccgcgggcgatcaccacccccagcaggaccgccgggaaataccacaggtggtacagggtgccgtctatgagcagctttttgagccactccaggggggagaagcccccgttgtaccagttcaggggcagatagagcagaactgcggcggcgtagagggtcagcgtccgcttcaaaaatctgcccgtgcccctccagccgtcctgggagagaaagtacccgctgaccatgaggaaaaaagggaccgcgatccgggccagcacccgggtgagccagaagtcggcctccggggccagtccggccagaggggcggtgtggttgcacaccgccaggaacgccgccagcaggcggaagcggtccagcacaggagcatcccggcgggcgctcatggctctccctcccagacggtgaggatgaacccgccgcagttgtctccggagagctgccagcaccccgccggcggctccagttccaggacggcgctggggcaggggagtcgggacacccgggcggtcctgccgctgcccagccggcagagccggggggacacctccaggaagggaacgtactcctccagacagagcccgtgttcctccatcagctgggcgtggggcgcccccacatagcggaagtgccagggctcagcggcgatgccggtgagggcctccttctcccggcagtaccgctggaggaagccgtaccgggccgctgcccgtcggaaagcgccgcaggccccggagtcggggaagctggggcggatgaagtcaagatcggggacgtcctcccccaggtcgatggccaggccggtctggtgctcgctgcaccccggaagggccacgtactgccgggtaaaggcatccccctcccgggcccgggtgtcgtcccagatggcctgctgctccgcccggctccgccagccggagacggggacgatagcccgcccgccccccacggagcggatgcaggcggccagcagccgggccgcacgccgctccaggagcacctgggggtggagccggtccacggggaccagctccggcggcgccccctcctggagggggtgtgcccgatcgatcaggaccagcgggccctggcaggtctgctcccggcggagccgcaggggcctcatgctcccacccccagccggatcatgcggctgaccagggaggtgaagtccaggccggcgccctgcatcatagtgggatagcggctgtggggggtgaagccggggatggtgttgacctcgttgaacagcagcgccccctccggggtgaggaacaggtccacccgggcaaagccccggcagtccagggcgcggaagatggtccgggcggcctcctgcacccgggcggccgcctccggagggatgcgggcagggcagtggatggcggaggtcttgagggtgtacttctcctcaaagtcgaaaaaaccgccggacagctggatctcgtccaccaggcccactgtcagttcttcgctgcccagtacggcgcagcccacctcaaagccggagaccgcctcctccagcaggacacggcggtcataggccagcgcggccctcaccgccccatccagctgctccggcccctccacccggctcacgccgaaggaggagcccgcccggaccggcttgacaaagagggggaagcccaccgcctccgccccccggcgcagttccgcgggagagaagccgggctccagcacgatccctctggggctggggaccccggccagggcggccagcttgtgggagcggtccttgtccatgcacagggcgctggacagggtgccgcagccgatgagggggacccccgccagctcaaagagcccctgaagggtgccgtcctccccgttgctgccgtggatcagggggaaggccccgtcaaaggccagggtccggccggagccgtccagcaggagcagggcggccccgccccggtccagccgcagggtgcaggggaggcaggcgggctcctccttccagcggtcctccgggatggcctccagcgccccgccgtaccagcgccaggccccctcccgggtgatgcccacagggatgggctgatacaggctccggtccatatgggtgagcaccccataggcggaggccagagagacgctgtactcgggggaacacccgccgaacagcaccaggatctgtttcatgttctgtcaactccttctgtgtgggggaggggacagaccagaaaaaagcgcgtccccctccgatgaccctatggtatcagaggggggcgcaccttgcttggagtctttcctgcgaaagtctgataagatccgtaagaaaatcttgcgattttcttacggaccggtctggtccagaagataggcggggtaggggcggtccaggcggtagcccagcttctccgccagggcggcggagcgccggtcgtgggcgtcccaggaggggaggagcccctggtccaggcaggtcaggatcagccgggcgccgcaggacagggccagcccccggcggcgcaggtccggccgggtgtcgatctggatctcgatgccgccgtcccagacggcgtaggaggaggcaccggccgcggggaccccgtcccgaagagcgatgacccccagcccacgccgggcgaagtcgggaccgtcccggaaattgccgcacaggtcccgggaccagtcctgggccgtcagcaggggatagtgcccggccagaatgggggagagggagaagcctgggggcagggcggcggcgaaggcggccagccggtcccggtcaaagtcctccggggccccacagagggcatagcggaggaaggggacggcacggcggccccacaccgcccggatcacgggggcccagtccccggtccgggggaccagcaggggccggtcggcctgccgcaccagggccgggtccggccggccggcgaaaaagcagaaatctccgatggcgcacagggcgctctccggcggatgcccgcccctggtgcgcacctggcccatgtgcccctggagacaggagaggatcatccccttctcccagcctgcgaacaggggggcggcgtcatggctcacgggctggaccctcctcacgccgtccgccccggggcagcgtcacctggaagcagacctgatcctcccggctccaggcggtgatggtcccgccgtggagagtcaggatctccttggctatggccaagccaaggcccgcgccccccgtccgggtggcgcgggagctgtccaggcggaagaactggtcaaagatgcgcgccagcttctccggggggatggtccgcccggagttgaggaacctgaggacaatggaatccccctcctccccgccggagatgcggaccacgctgccgggagtgctgtaatggcaggcgttgcggagcaggttgtcaaacacccgggccagcttgtccgggtcgcagtcatattccaggctggggggaagctccagggcgcaggtcaggtcccgctcccccagcatgggggcgaactcgctgaccacctgctggagcatccggcacaggtccacgggctgcttctccagctccagatggctgaggttgaagcgggtgatctcaaagaattcgttgatgagctcctccagacgctccgccttgtccagggcgatgccggtgtagcgggcgcgcagctccggggagagctggggctcatcacggagcagtgtcagatagccgatgacgctggtgaggggggtcttcaggtcgtgggccagatagaccaccaggtcgtttttccgctgctccgcctcccgggcggcccgctgggcacgcagggcctcctcccgggccaggttcagctggtcctccacgctcttcatggaggcgggcaggcggatgggctcctccgtgggacgggtgagctgggcggaggcgccgatcagcgcatccagctggcggactgggcgggagatgaagtgccagctgatgacaacccagcccagcaggaccaccgctatgcagaaaaagaagtagtagtcccggacccacaggagcaggtggtagagagggtcggtctcataccaggtaaggcggctgcacaccaggacccccagggcggagaccgccagcaccacggtcacccaggccatcagggccagcagataatacccccagcgctggagggcgcggtagagcccacggtctgtctggagccgctgcgccagacggggcttgcgttccttactcaatggtgtagcccaccccccacacagtcttgatgaatttcggctttcggctgggttcgtgcatcttctcccgcaggcgggcgatgtgggacatgacggtgttgttgctgtccatatacttctctccccacaccgactcgaacagctcctcgctggacaccacctgcccccggtgctggcacaggtgccataggatggaaaattccaggggggtcagggggagctcctcgccgaacagcacgcacttgtgggtggcccgggagatctggagcccccggaagtcgtgctcctgcacctctccccccggctggccgccctggttgtaccgggtgtaccgccggagctgggtcttgacccgggccaccagctccagaggattgaagggcttggtgaggtagtcgtccgcccccagggtcagccccatgatcttgtccatgtcctccaccctggcagtgagcatcaggatggggaacaggtgcgcctcccggatcttctggcacagagtgaagccgtccatatccgggagcatcacatccaggatggccaggtcaagcggcgtggaggccacacaggccagggcgtcccccgcgcggccgaacttgtggacggtgtagccctcatttttcagatagacctccaccaagtcggcgatggcggcctcgtcgtctacgatcaaaatgtttgtctccatgtcccgggacagtctcctttgtggttttgtccattgtaccacggggaggaggccctgtcgagaggcagggccggacagaaagctcccccctcgcgctccgtccgacggacagtgcgcgaggggggagaatgccgggaaccgcccgggcgcggagggcggaggctacggctccccgcaggggccgggggtgttgtccctgtaataatccacgatgtggcggacaaagccgccggccagccgctggcgggcctccacctccttggggaccaccagcacggtgttgcgggagatgggcgggtcgatggggatggcctccacgtcatactgggtggcggcaatgcgcttggagaggatggagatcccgaaatttccctccaccatccccaggatggcgtccacctggtcgcactcgaaggcgatgttgggccgcaggccgcactggcggaaggattcccggatgatggcattgagaccgtagctcttgtccagaatgaccagcttttcctccgccagatcctgccaggtgaccacatccagcccggcgaaccgatggcggcggctgacgatggcgtggtagttgtccaccactagggtatagaggcggtagtggtccagctgataggcgtcgatgttggacgccttggaaaagggggagatgatgtgggcgatgaaggccatatccagctttcccgccaccagctggtccatcacccccagggaggtcccccgctcgatgtcgatggtgacgccgccgtcgggatactgcttcaaaaaggtggagatgggggtagtcagccccacccggcccatgtggtccacactgccgatgtgcagatgcccgctgttggagaaccgcttgatggaggccatcatctcgtcatagtcggccagcagctttcgggcgtggggctcgaactcccggcctgcgggcgtcagcgtcaccacccggcggctgcggtcaaacagacggacgttcagctcatcctccagcttgctgatctgcttggacagggcggactgggagctggagacctcaaaggcggcctttgtaaagctccgctgatccaccacattgacaaagcatttcaactgaaacaggtccatctgacatccatcccttgtgcagattgccgtgatatgccctatgataccatggggggcggagaaagacaacgagagtttcccaaaatcccaggcagtatgataccaaattggaaaataaaaattccaaaacagaatgatatgctgttttggaatggaatatgccttgaaaatagaatccgattccgtttcggaaatatgactttccaaagtgagattgctttttgttccggattttggttaaaatgacgccaaacaacagaagaaagaagggagtacatgcagcaagagacacagtttgatctgatcgtggtgggaggcggcacagccggggccttcagcgccatcgccgcggcccgggaggggctgaaggtggccgtggtggagcgggggacctgcctgggcggcctggccgccagctccggtctgaccgagatgaacgcggcgggctttcagggggcgcccctctaccgggggatcgagcgggaggtctttgaccgcctgatctggggaggacatgcggcctaccacttcgcagtcccaatgtcctccaacaaagaggtgaagatcgaccgcctccgctatgacccggagcggctcaagcttctgctggagcagctggccgtggaggcggggatcaccctgctctatgagacggagctgaccgcggccagagagggagaggaggagtgtcagatcacggcccgggggccgtatcaggagatcgccctctccggaaaatacctgatcgacgccaccggaaacgcctccctggtccaggcgctgggcggggagacggaggcggcggacgagagggagcggatgatcgccaccctgatgttccgcatctccaacgtggacctggaccagctggacgcctttatccacagcccacgcctgggggagaccatccggcagggccgggagagcggtgtgctgaagggaggtatcctggcctttacccccatccccggcacccgggacgtgagcctgaatgtcacccgggccaagtttgaccacgaggatctggccgacgccacccgggggatggtggagctgaggtcccagatcgagcccatcttccgcttcgtccagcgggaggtgcccggcctggagggggcctacctctccggcatcgcccctctggccggtgtgcgggacgcccggcgcatccggggggcctaccggctgaccatcgaggatctggagcggatgacctgctttgaggaccgggtggcctgcggatgctatcccatggacctccacgaccccgtgaccaacaccgtggtgtggaagatgctccccggggtctatcatatcccctaccgcagcctgctccccctggggatgaagcggaccctggcggccggaaagtgcctgtccgcggacccgaaggcctttggggcggtccgggtcatgcccatcatgatgaacgtgggagagtcggcgggctatgcggcggcattggccctgcgggaaaacaagactctggaccagatctcctccgccagcctgcggagctgtctggatcagaaatatggtgtgtaagaaagagaagggagagatccaaaagtgaaaggcaagacctcaaaactcgtgatgctgctgatctcctttgcgttcatcctgctgttccagttcatccccgctcccgcgggcctgaaccagaccagcatgcaggtcatcggtatcttcatcggcatcatgctcatgtggaacttcatcggcaccgactggcccagcctgctgtgcatggcgatcctggccatcttccagatcatgtcgccgggggatatctttaaaagcggcttcggcaactccaccatcgccttcctgctggtgttcttcatgctcagccacgtgctgtcccaggtgggcctcacccgccggctggccatctggttttttaccaacaagctggcccagcgcagcccctggatgttcgtgaccatgttcctcttcggggccatgttcatggcctccttcatgtctcagaccgcggccctgctggtcttcctgcccatcgcggagcaggtcttcaaggagctgaagtatgagaagggggaccgcttcccccagatgctggtgctgggcctgggcatcgcggtggggatcggctccgccaacacccccctgggccacgccatcatcctgatccccatccagctgctggagtcccagaccggcctgtccgtgaacatcatggcatacagcgctttcggcattgtcaccggcctgctgatctttgcggccctgatcctggtgtaccgcctgctctaccgcccggacctgaacaagctgcgccactatgatgccaccaggctgcgctctgacctccagcccatgagcgtgcaggagaagatctccgcggtcctgtttgtggtggtcatcgtgatctggctcctccagggcttcctgaaggacatcgcccccaccgtcggcgggtatatctctgcgctgggcaatgcggtgcctgtgatggtggccatcgtgatcctctgcctgaccaaggtggacggcaagcccaataaggacgcggccgcccgcggcgtgccctggagcgccctgatcttcaatgccgccgtcctggtcatcagcggcgccctgacgctggagaaggtgggcatctccgacttccttatcagcaacgtcacccccctggtctccgggatgaaccagaccatcttcatcctggtcatcgccaccctgtgcatcatcgcaaccaacttctcctccaacaccgtgtgcgccaccgtgttctataccatctccgcccccatcgccctggctatgggcaacatcaatatggtagccctggcctccgtcatcggagccgcggcctcctacgccttcgccactccccccagcaccatgcccatggccgtggtggccggcaccggctgggtggacgtgaaggacatgttcaagtacggcggcctgatggccctgctgagcatcgtgatcctggcctttgtgggctaccccatcgccgccgcggtgctgtaagcggccgcctggcacgcaagatctcagagcggcgtgaggcgtccgccccacggtggatgccggaatgaaaagccccgtgaggtccgctcaacggcagaccccgcggggcctttcaggatatcgaaaaaaggctacgccagattttgagtcttgacataatgataaaaggatctcacgtggggcgggatctctttctggttgaggatcaccatctgagtgtcccgcagcagggcatccttcagggggatgatgcacaggtcgtccgactcctcgatgaccaggggagagagcatggcgatccccatgttctgggagaccatatgcagaacagagcggacagtggtgcagtacatggcgatatgcagggggaccctgtgggcgtaaaaggctttctgaacggccctgtgatagacgtccatggtccggtccgtcatgataaagggctggtcagccaggtcctcatatgtgagctggctccggcctgcaaaggggtggtcccggctgaccacgatctgataggactcccggaagcaggaatgggagcggtattctggatactgagagaaattggcccgctcagctccttccgggtacatgctggagacaaagaccacatccagctcccctttatggagatcctgaaggagcggcgtggtggtggattcccggatctcgatctccatgctggggtggagcttggaaaaattggccaccagaggggccaggcggttgtgcaggccgaaatagatgctgcccacccggagggagcgcttgccgttgctgcggtgctgttccatggcgtggagcatcccttcataacagaccatcatctgttcggcgtaagcgacgaagtcacggcctgccggggtcagctccacgcggcgggtggtgcgctcaaagatggagatccccagctcctcctccagccggcggatgcttttggacagggaggactgagagcggttgagctgaaaggatgcctccagaaatgtgcggtattttaccaccgccagcacgtggcggacctggtccagctccaacagagcaccccctctcagaatgatccttttcattatagcatgacgcctgccccgttacaatgagaatggaccgaatgttttgggggcagagtggaaaataccaggagaaagagaggggaaaatgcacaaaaaaggaataaaagattctatttattccttttgagaataaatagagagggaagaagaattgctcctgagatggtttgctctataatttgacacagagaacgagccggcttgaaaatcagatcaggaggaatgtgagaagatcatgagtacgaaaaaaacgatcgcgactatcatcggcgtcctgcttatgtttggatgtcagtttctgccccccgtctttgggctgacccctctggggatgcaggtggccggtattttcatcggcacgatcctgctgtggatgttcgtttcggtcacctggcccagtatcctgtgcatcatcgcgctgatcctgtccccgctgtacacgtattccagcggcctgtcgggctctatggggggctggatcacttcctttgtgcttttcagctccatggtgacctataccctgggccagaccggcttcctcaagcgctgcgcggtctggttcgtcacccggccctgggcgcagaagaacccctggctgtttttggggctgctgtttctggctcccctggtcatcggttcctttatgtctcccatcccggcctttatcgtctgcctgcccattgcagagcagatcttcaaggaattgaagtacgagaagggcgaccgtttccctcagatcgtcgtgctgggcatcctgttttttgcctccctgtccactgctgccaccccgatcgcccacacggtcaccacgatggcactctccctgtatgagaacgacgccggggtcccggtgaatttcgtctcctataccatcttcggcgtagcggcatgcctggtcactttcgcggcgtccatggtgctgaccaaattcgtctgtcgtccagggacggagcgcctgagcagtctggacagctctgtgctgaagtctgagaccactccgatgagccgccaggagaaatatacgctgctcgtcttcgtgctggtggtggccatgtggctgctgcccgggatcattgcgcctgtcctgcccgaggtggcctccgccatctcctcgctggggacgcccaccccggccatgatcggagcgtgcctgctgtgcgtcctccatgtggaggggaagcctctgatgaacttcaatgaggccgtggccaagggggtgccctggggtgctgtgttcatggtggcggccaccagcgtgctgggcagcgccctgacccatgaagaagcgggcatcaccgctgtggtcagcggagcgctctcccccatcatcggcagtatgtcccccattatcttcgtgctgtttatcgccctggccacggtcatgatcaccaactttgcctccaacacggtcaccgtcactctgatgtacagcatctcgctgccgctggtgtatggcggagctatttccggggtcgatcctgccgcgttgacctgcgtgatcggcgcctgtgcctgcgtggcctgcgcgactccgccctccacggcccacgccgccattgcggccgggtccggatggctgaatacggatacgatgctcaaatatgggctcttgtggtccgtcacagcggccgtgatctttgcggtggtgggctacccgatcgccgcggccatcatgtgacagagggaaaggagagctgcttatggaacgacagtttgatgttattgtggtcggcggcggtaccgccggttttgcagccgctgtgacggccgccagagggggtgcaaagacgctgctcatcgaggaaaaggcgtatttgggcgggaccgccaccggagcgcaggtgagcatgttcatgggttttgccgatggtgagccggacaggcctcagcagggcatcatcaaggacgtgatggacggcctcgccgctgcgggcgggacccccggcatcgagacgatctatctatgcggacgcagagacctggatatcccagtcatcccctatgagtccgagatactcaaagatctgatcttcgatctggtggaccaggcgggcgtggagctgctccttcatacccgggtcatcggcgcgcaggtagaggacggcgtcatcaccgcactgaccatccacaacgagcagggggtccaaactgtgagcggcaaagcggtcattgacgcctccttccatgggagcgtggcggtcagtgccggctgccgctgggagataggggacgaaaaaggagtccttcagcccgggaccttgatgtacaaaatggccggtgtggacatagcgcggtatgagcaggtcagccagccggagcgggagcgtctggcacagaaggggatcgaagaagggtgcctttatgtcaataacctgttggcacgccccctcccatccggaacgatctactccaatatgagccgaattcggatcgatcctctggatgcggctcagtggagccgggcggagatggaggcccggcgtcaggtaaggaggatcagccgcttctttattgaaaacgtgccgggatttgagaaggcctacctcatctctacaggagatttcaccggcctgcgggactcccgaaggatccaggggaaatatgtcctcacgggtgaggacgtggtagaggggaagctctttgcagaccctgtagtcagaagctcctaccctgtggatatccatgacaccgacggtgtctccagcaccatcgtcaagcccaagacgggcgtgttctatatcccttaccactgtctggtcaccaacgagatctccaacctcctgctggcggggcggtgtatttccactgattatgcggcccatgcctgcatccgtgtcatgataacctgtatgcgcctgggagaggcggcaggtctggctgcggctgagagcgtgcacctggggacagcgcccaatgccctggacggcaggagcatctcaaagcagctgggcttttgaaaaattggatctggggctgccgcagggatacctgcggcggccccccgtattttgatatttggcaaaggagaaagttttgatgaaaacagtgatgctgcgcaatgtcgaggtgggctgcggaaagcccaaggtgatcgtccccatcgtggccgctacggcccagggcatcctggagaaggcccgggagttccgtgcccacgccctggacgtggtggagtggcgggtggacttctatgaggatgtcttccagctgcctaaggtgctgagcacactgaaggggctgcgggagatcctgggggagacccccatcctgttcaccttccgcaccaggaaggaggggggcgagaaggagatcgacatggaggcctatacggcgctgaacaccgcggtggcccagtcgggagacgcggacgccgtggatgtggaggtcttctccggggacgaggtggtccgccggaacattcaggccatccacgccgcggggaaagcggtggtgggctccaaccacgacttcggcggcacgccggacaaggctgacctgctctttcgcctgcggaagatgcaggagctgggggcggacattccgaagatcgcggtgatgccccggtgcccgggagatgtcattgccctgctggacgccacccaggagatgagcgggaagtacgccgaccggcccatcatcaccatgtccatgggggccggggtggtcagccgcctgtgcggggagtacttcggctcggccatgaccttcggcgcggtgggccaggtctccgcccccgggcagatccccgtggaggagctgaacgccgccatggatatcctccaccgggccctggccccccggagctgagggggagggggataaatgagccgtcaagtcaccggccgcacgggactgctgtgcctgctgggcagcccggtggcccacagcatctcccccgcgatgcacaacgaggcctgcgctctgctggatctggactatacctacctggcctttgacgtggcgccggaccgcctggccgaggcggtggaggggctgaaggctctgggggtgcgtggcttcaacgtgaccatgccccacaagactgcggcggcggccctgtgcgagcgtctctctccggccgcccgcatctgcggggcggtcaacaccgtggtcaacgagggcggaagcctggtgggccacaccaccgatggggagggctatatgaggagcgcccgggaggcgggctttcagccggaggggaagcggatggtccagctgggtgccggcggtgccggcaccgccgtcctggtccaggccgctctggacggaatggcggccattgatgtgttcaaccccagggacgccttctggccccgggcggagcgggtggcggccgagctggagcgggcctcccagtgccgggtggtcctccacgatctggacgaccgggaggcgctgcggacctgcctggggcaggcggaccttctggtgaacaccacgccggtgggtatggagcggatgccgggctgcctgatccccgacgcctcctggctccgcgccgggctgaccgtgtcggacgtgatctaccagccccgggagacacagctgctgaggatggcccgagaggcgggactgaagaccttcaacgggatgtatatgctgctccaccagggggcggcgtccttccgcctgtggaccgggcgggagatgcccatccagcagatccgggagaagtattttcaataggggactggcagggaccaaatcagtgcggccagcgccgggaaggcgctgaccgcactgctgcgcttacaggacggagcgggcggggccgccgggaccatacaagtatcatgctccccaaagccggaacaggccagaaggaccatatttcttggggcgcttgtccgaaaaccaggaaagcggcaagccgccccgccagaaggagaagaaacggcccggggaggtatgtaccaccgcggaaggcggtggtttgtggggaaaggggcagtttacagggtcaggacagactcacagcagcggaagtcgctgtcgatgttgtgggcgatgaaccgggccttgaagctgcgggggttgcacatgacctgggtggagccgccagagatatcaagatcttccggaagcacgaacttgatgcatttgaccagcacatcgcggcaggtggggaagttatgggccgggatggtcatggccttgctcccgcgctgatactccattccattttcatccacctcagtgagaatggcagccaaggccacccgcttgccagggcatacattcttgatggtcacatccatctggatgatgcggcccagggactccagatagacattgcccatgtccaccaccacggagtccgagcagccttcgatggtcaggtccgccggcacggggcactcctcaggattgaccaccacgtcgcactccacagacacggtgggctcaggaaagtccaccacgttcccctcggtgtcggagtaggtgatagactcattgaccagcttggtgccgggattctggcccacgtggcggatgaagaactccagcgcagcactctccggggaggagacgcccagctgggggatggtccagcgcagggaggtggcattgagcatggtggcgctgccggcggagggcgtcaggatgctggtgatgacgaaatcagcggtcacggtctcgttgatgacgatgttggtggcaccagtcttggagatattggccgccagctccgcgaagagctcctccagttcggcggcgtcgggggtgaccgctacgtggctggcgtcggggtcggtggcccagtcgttgagagcattgacatccaccccgtcagagcccagcaggccgatgcagtagatgacgatgccctgggcccgggcggcggctgcgacgggggccgggggcgcaccggcggtggtctttccgtcggtgaacatgacgatgaccttgtcattgctggagctggggtcaaagagggcgatggccttggagaaggcatcggcatggttggtgctcccgccagctgaaagggagtctacagcgttcttcaaggtggataccgaggtgatcagctgggtgttctgctgggccgtgtcggcaaagctgacgatgccgatgtggctgccggagccgatctcaccggaggactggccgccggtggactgggagatgatgtcgatgaaggtcttcgcgccggtcttcatgttggtcagcggggtcccggtcatactgccggagcggtccagtaccagcgcaatgtcagtgggggtggaaataatatcaggagcggcagtgagggccagcgtgactttcagggagccgtcacagtcgatcctatccgcattgatcactttattagaatttgtaatacccattcgtattacctccttcggggcgaggccccaaaacaatctatgcgccgctgtcccacgttgacaccgccgcccatagaaaaggcgtccccctccggaccggccggagagggacgcctctgtgtggtggggccaatgccccccatctggatgggggcgtggggcctgcggggaccagccggtcacagcaggtccaggaagcggcagcggtcaaaacaggcgaagatctcctgacggcgggggcgggccagaaaggggacgccggagggggagccgcacagggcgggcaggccctgttcttccatcagccggtccagctcgtccacgatctggcgcagagtgcgcctgccgtccatcaggcgccgctgggcgtagaccatgcaccagcccagggcagcagactgctcgccgtcagccagctgctccacatacctcagatcgatggtctcccgatcgatggatatgccgtcccggcccagggctttgagcttgatccggtctccccggaactggggggagggtctgggacagcggcagagaccgggggcgggagcaggctccatgacggcgctcccggcggggaaggcccgggcctcctccttggcggaggcggtgatgtcccgggggacataccggtccatctggatgatgcggtcggcggcgtggaagaaggcgccggagctgcctgccacgatgacagtggagatgccgtggataccatagagctcccggatgcggtcgaggaagggggtgataggctccatgtcccggtggatgacccgctgcatcagctcatcccggatcatgaagttggtggcgctggtgtcctcatccatgaggagcagggaggtccccgcctccatggcctccaccacgccggcggcctgggaggtgctgccgctggcgtcctcggtggtgaaatggacagtgtcctttccattgggcaggttgttgataagcatggagatgtcggtgttccggatgctcctcccgtcctcggcacggatcttgaccgctgtgcggtcggtgatgacatactcccgcccatccccggcgatgtggtcgtacacccccagctccagggccttgagcagggtagacttcccgtggtagccgccgcccacgatcagagtgatccccttggggatgcccatgccggtgatggtcccccggtggggcagctccagggtgaccgagagctctctgggggagcggaaggggacggcctgcttcatgggcagggaggagacgccggaggtccggggcaggatgctgccgtcggccacaaaggcgcacaggcccagggcgggcagctgccggcggatatcctgctggtcctctgccaggtcagccgcttcctggaggcgctttccgtccagattgcggtagagcagggactcctccacgcaccggggcagcaggtcgaagaggatcttttccagctcccgggcgttgatggtgcgaccgttggcggggaagcccacctccagccgcagcagcagatcgccgtgctccgggtccagggcgcaggcggtccgctccagcacctcctggccgcaccggctgatagagatgaggccgctgtgtcccgagcccttagcctgaagggaagcctgggccgcccgccggccaaactggcgggtgagcgcatcctgaagggcgatgcgccggcagggggtctgatagagctgcctggggaatccggcctgctttccgttcacatggatgctcaatttggagggagcggcaaaggggtccccctgtacgtggtcgatggacagcacgtaggcggggaactgataggcgccccgggtgtccttataggccggatagcccttgcggtcgatgcgggccaataggtttctcagatctgttgaagtctgcatagcgatactcctgtcaatttgcttttgtgccccggagagcggcacagggcctgaagtgcctgtgggaaaggatggggggagcgcctatctctcctgccgctaggcgaggaagtcggagatggcctccacagtccgggcctgctgttcctgaggcgtgatctccgccggcgggtcgccccgctggaggccgtagctgccgaactgggcatggttgccgccgtcgatctccaccacatgttccgtatagtcgatcttgtcctccacgctctgattcagggagccgtagacggtgagggtgtctgcggacgggtattcgccgtagagataggcccccagcaggatgaggccgtccacctggtcccggtgcccggcggcgaattgggaggccatggctccgcccatggagtgtccggccagataccagtgccggatctccggaaattgggccatcacgtcttcggcggcgttgacatcaaagatggccatgcggaagggcatctccaccagaatacaggtgaggccggtcctccgcagctggtccagcagaggcaggtaggcagccccctccaccttggccccggggtaaaagatgatggcagtgtccgtgggataggacggggagaggatggtcaggctgccccggacctcaatgttctcgccgctggccaatacatccagggccgcatcctctgcccggtagtagtcggatacataccagaaaaatccggccgccagaagaagcatcgccagcaggacacccgtggccagccgcagccccttccggtgaaaaacagctgtgatctgcataagagagccacttcccatctgttatgatcggatcagtttccttgctggcgggggctcgtgcgaagtatctccgcacacccgacctgcgggaggcctttactggggctctccccgtttttttcggaaaagccgatccttcagcccgtggtggatgccgctgtaactgaccggcagctccacggacagcaggatcttggcaaaccagaggaaggacagcaggaccaggaccgggatggcgcagcaggtcaccagcatcacggccagcgcctccataaagcggttgaccatctcgcccactttgtccgtgatcccggagaccccgtctgtcacggtggagatcagcccggaaaagaagcctttttctccctcgcccgccgtctctgattcgctctccagctctgcggcggcatctctggctgtttcaatggtggcctcgatggatgcctggtaggagtcctcgatcagatcagagacatagacgctggctgggatgaccaaaaagatcagcagtccaaacgcggtcagccttgccgccagcagacggaggcttttccagtcaaagaggacatacagcacatacagcaggcaggacacggggatcaggaaggaaaaggtcaccgttccggtgatggtcagcagatatttttccaggaacacggcacacagcaccagcagaaaatgggagctcagatcggccagcttgtcggcgatcggggtggcgacgtcaccggggatcagcgtgatcgccgcagaagcggcggcggaggcggcggacaattccagcacggtggtctgcttctcctccaaggctgccagggtagggccgtgaagatccggggacgaggcgggaccggaaaggacgaacacggacagcagtgcgatgagcagcggaatgacgacaaacagcgtctttttttgcagaacttccttcatagcttttctctctttccatttcttttttgcatgaaaaaatggcgggcagtgcaaggcggcgcgctcaacagttacctctgtggcctgccgtcttcacaacagtctttgcagagctcgcgaagcagaggagaaaactaggggggatgccctgcgtcccgctcataacagcgatgcggatatccgctccagccctgtccccagtccctcaaagcctgcgcaccggctggagcaggtgttgacggcgcggtccagcaggggctgggcctggcgttccgtgtccaggcacaggtccagcgccagcacgtcctcccacgcccggttgaggaaggccacctcccggcggccatgagtgcgggtgaggcaggcgggcccggccttttccagatagccctccacccgggacggggagaggccggcggcggtgaggctgtcggccaggcctgcgcggaagaggccggggatgtcctcccgctggagagggggcacatcccagcggacaaaggcgtagcggctgtggcagtggacggccagcaggcacccgcggccccgcaggcggatgacatgcaggtcccagcagaagcgccggtccggctctgtgccccaggccggcgtttttatcctcaggaaccgttggaggggaaaggtcagtcccagttccatcacgccgcctcctctctcacaggcgggtcaggatgtcccggaaaaagccgcgggcgcggtccaggtccccctcatccggccggcccttggccaggccgcccaccagcttgaaggggccgaaggtgtcgtagcccttgcagccgaaggtccccagcacggcgcagccccgctccccggccagctccttcagctcccgggtgctctgtcccatgccgcccccgtaggtgcagacgaagaacacaggcttgccatggggcagatactgccgggcggcgtgtaagacgctggtgtggaacttcccaaagtagacgccggaggcgaagccgacgcagtcgtagtcctccagccggacggtctggcggacggtggcgtcgatcaggtcgatctccccctcccgggccatggcctccagcaccttccgggtgttgccgtggtggcgggaatagtaacagacggcggttctcatgacatgacgctccttttaaatgaggatgccctcgcagtggtccagctcgtgctggatgatctgggcggtccagccggtgaaggtcttacaccgctcctggaaacgctcgttctgccagcggaccttgatggaccgccaccgccgggccctccgggtgccggagagggacaggcagccctcctccgcctcataggggccggaccttttgacgatctccgggttgagcatgaccagatagctgccctcgttgtcaaaggcgatgatgcgcttgttcacgccgatcatattggccgccatgcccacgcagcccgcgctgtggtgggtcagcgtctccagcaggtccgctgccgcgggcaggtcctccggcgtagccagctcggccttctgggccagaaaggtctcgtctttgcagatgtcacggatcataatttcgatctctccttttgcggcaggctcaccccggcacagcgcgcagcgcctgtctggaggtcggtgaccgtcccctcaaagtccgtttcccccctccgggccggacccggctgggcgcttgagctcgaaggagtgctgatcctccacggagaagccggcggcctcgttttggaagaggggcagagatctgatctcgtcgggccatgggtccagctccagccagttgagaacgcggcgggggccatcctccagtccccgcgtgatcctctcgccgttctcaatggctgtgatacgcgcctcctctttcaggctgtcacaggcattatagcacagaaatgagaaaaatgccacgggaacaaaggagcctttctccgcatccatgcggagaaaggctccctaaaaacgagtgagacaggccgaatcaggccacgccgatggtgatcagcaggttggaaaagatacgctgttccccggtggagatggccagccggacgccgggctgacagcaggcgtcatagaactcatagcgtcccagcttgttcagctccatgccgtccagcatggtctggaactccccgaagatctccggagtggtgccgtcggcggggtccatgacctccgccttctcgatattcaccgtgctctggatggcggccagaacgtcggtaacagtaggcaggccgggggtcagccccaggtacacggtctctgcctggccggtcttggagtccagggggtagttgccgtctgcgatgaggaccttgtccccgtggccgcacagggccagggcggccatgatgtcggggtggatgagctttcctttcagcatttgaatgacctcactttttctccggaggggacggggcccgccccggaatgtttacttttcgttctcccgcagctcgcccagctttccgccggggtggcagcggacgtatttgacggggtcccagtccttctccacctggagcgccacagagagggcctgaagggtgagcagctccgccagcacggagttgcggggggcccggttcagggggccgccctccgccttgacgccggcgaagaggaaggcgtcggtgtgcttggcaagccagctgttcgggttgccggagacgccgatgaccttgcagccgttgttctggacagccagcacggtggccttcagctcggcggtctcaccggaattggagatggcgatgaccacgtccccggccgccagctgcccgcaggagccgtggacggcctcggtgccgtggaggtagtaggcggggttgccggtggaggagaacagggaggcggcgtaggtggacacatggctgcacttgccgatgccggtgacgtggagacggccgcccttggcctgggaatccaggatcagctgggcggcggcctcgtactcctcgggactgcgtgccttcaaaaaggcattgaattcggtctctgcggcggcaaagaaattggataccgcctgtttgctctcaggtttcagcataacgactctccttatggataggatttgactgcccccgcggggacggggacagtcaaggacagatcactgcttcaaagcgtccagctccgccgggtcaaagccctggtagtcccgctccacaaggagctgctggacctcctccaccgtgggcaggctgggcatggcgcccatacgggacacagtgatggcggcggtgtggctggcaaaagccagggcctcgccctggggcagaccggcggtgaggccggtgcagaaggcggccacaaaggagtcgccggcggccgtggggtcggccacatgctccatcttcacgcagtgggtgtgatggatgccgtttttccccgccgcgatggagccgttttcccccatggtgatgatgaggttctccaccccccgggcctggaaggcctgggagaccacggccacgtcctccatgttgatgccgctggagacgtcgatggagtggccggccaggatggcggcctcgtgctcgttgggggagaggtaggtggcgcaggcgagcagccggtcggacatgggggcggctggggcggggttgatcatcacggggaccccggcgtcgtgggcccactgggccaccgcctcgatgacctccataggcagctcgaactgcatcatcaccaggtcaaagcggccgatctcctcccggagccaggccacgtcatccaccgtgatggtgaagttggcgccgggacagacagtgatgcggttctgggcgccgtgttccgtcacctccagggtgatgtggcctacgccggaggactcctgggggtccactgacacatgggacacgtccacaccggcagcggcagcggtatccgtcatgatcttaccgaacgcatcgtcccccacctggcccaccatggtcacgtgggcgcccaggcgggcacactggaccgcctgattggcgcccttcccccccggcgcggtctggaacttcaggccgatgacggtctcgccggaattgggggcgcgcttggtggaggcgatcagatccatcataaagctgcccaccaccagaatatttggctttttcagcatgtcagagctcctcctctggtattgatcttgctcagtgaggattgtataacaatttccgaaaaattgcaaggagatccgggaaattctgtcggagacctcagggcttgggggcaccggcccccttcagctttttgactatgggagcgagcaagggggagaggagggagataagggcgatcaacaggaacacggcgcagatggggtgggttaggaaaatcatcaagctgccatctgacatcatcaacgcgccacggaagttgctctccgccatagagcctaggatgatgccaatcacgatggcggacatggagaactccatcttgttcagaaaatagcccaggaagccgaagcccaccatgacgaacacgtcggtaatggagttgttgtaggcaaaggcacccacaaaggtcatggtgaagatgataggcatcaggtactttttggggatgttgatgaccttgacaaacaggcgaatggcggagaaaccgaacagccccatgaagaagttggcggccagcaggcccagaaagatggtgtacacctggggagcctggttctggaacagcaggggaccgggctgcatgccctggaccatgagggcgcccagcatgatggcagtggcaccgtcgccggggatacccagggtgagcatggggatcatggcgccgccggacacggcgttgttgcctgcctcaggggcgcagatgccctcgggagcgccgtcgccgaacttctccttgtgcttggaccagcgcttggcctcgttataggagatgaaggaggagatgtccccgccggtgccgggcactgcgccgattacggtgccgatgatggaagagcggaggatggtgactgcgcactccttcaggtctgccatggtgggaaagacccgcttcagcttcacatcatgcttgacataggtctcgttgtaggagtcctcgatggaggccagcacctgggagaaagcgaacaggccgatcagcacggggacaaaggagagaccgcccagcaggtaggtggtgccgaaggtcatgcgcatctggccgctcatcgcgtcgatgccgatagtggagatgataagtccgatcacgccgcccatcaggcccttgaggacggagccggaggagacggaggtgataatggagatgccaaagatggccagggcgaagtactccggcttggagaactgcagcgccacagaggccagcaggggggagaagatcatcaggcagatggcggagaagatccctccgaaggtggaggagaaggtggacaggcccagggcccggcccggctggccgtacttgacagccatggggtagccgtcgatggtggtggcggcggaggccggggtcccgggggtcttcagcaggatggcggagatggagccaccgtagatggcgccgcagtagacgcccagcagcatcaggatgccgccgatgccctggaaggagaaggtgagcgggaagagcagggcgatgcccatgttgacggacagaccgggcagcgcgccgatgatgatacccaccgccacgccgaaaatgaggccaatcaggttcagcggggtcaatacattgataaatgcggtaaggatcgcgtcaaaattcataaagcatccacctccttcagcgcagccagatgggctcggggatgggggtgtgcagcagcttcacaaagactacatacagggccagcacgaacagcacatccaggatgaacatgcccttgccccgggcgcccagcatgtaggcggccacagggatgaaaagcagggcggccacgattaggcccaggaaatacatgaccacgcagaagaggacggtcagacccatgaactgatagaccagaaagttggcggggagggagatggagaaggtcttggacgactccttgtccttgttcttcgtggtcatgacggccagcaccacggccagcacgatgagcagtccccccagcatggtgggccagaagccggcgcctgggtctcctgcaccgaactcaatggggtactgggcgttgattgcgatgaccgctccgcccagaagcgcaatgatgacagcgacgatatagttccattttcgcatgtttgtcatggaaatcaccaatccttatttcagcagattcagatgtgggagcggcccacgggccgctcccatatcttgatttgagacggaagatatcttacacgtccagctcggccaggacctcaccgaacatctcgtggtcctctttcatcatctgatagcagtcgtcgccgatgatggagacagggtcgatgccctggttcatcaggtactcctgatactcggggtcggcgcaggtcttctcagcggcatcccgcaggatagtgaggatctcttcgggggtgtccttgggggccacgatgcaggcccaagagcggatggtcatgtcatagcccagctccttgaaagtgggcacgtcggggaacatgacggaacgctcgtcggccatgatggccaggatcttcaaggtgccggcctggacctggctgacaaagctggaggggtcggccagggtgccgtcgatgtgaccgccggtgagggcggcggcgatgtcagcggtgccgttgggataggggatatgcttcacctcgatgccgaactccttctccatctgaacggtggccacgtgccagatggcgcccatgccggagttgcccatctgaacggtgccggggttctccttgcagtaatccacgaactcctggaggctgtcatagggagcgtcggcggggacaatcagggcagcgggggcggcaatctgggcgcagataggggcgaagtcttcataggtcacggtgcacttgccctgatgggggaacatggccagctccacggtgacggcgcccagggtgtaaccgtcggccttggcgttggcggtctccaccatgccggtaacaccgccgccgtcgggcttgttggtgggaacgaagttggagccgtcgatgtaattcttcatgtactggatgaggccgcgggtagacacgtcggtgccgccgccggggtttttggggatgatgacggtgatgtccttggtggggtagtccacggactgggcggcgctggagccggcattggagccggaggcagcgggggtctgggtggtgctggagccggagccgccgctggagcagccggccagaagccccacggtgagggcggtgctcaggaagagcgcagtaagtttctggaatttcatttcagttcctccttaaaaatttaaatgtggatggatcacaaatatttgtcagccatgcgctttgtgatctgacgcaacatctccacttcggtgcggaaggtagtggtcaggtcctcagcgcgtttggaacgacattcggtggtgatggacagcccctccagggacaggtagtacttggcgttgacggggtagagctgccgctcgataagggagcagatggtcagctcctgagagagctcctccgccttctcgtcctggggatgggcgcagagccaggcgtagaggtcgcactgcatattggccatgacgccgctgtatccggtggcgccgtaccgcagggactccagcagggtggaggtattggcgttgtaaagcttcaggttgctgtcccggcagatgtccaacttctccttgatctgctggatgtcgcagcaggtgtccttcaggaagaagaagcggccgctctcggcacaccagcgggtcaccttgggggagagcacccgcttataggggtaggggcactcatagaatcccaggggcacctgggaagggagcttgtccagcagggcttggaggttggccagccagacctcatcgctctcctcctccttggccaggcggttggtgatgaggatgacggcgtctacccctgtcccggtcatggcggtcagttcatggacctgatcctcaaatgagtccgagatgtggccggaggcgatgaccgggacccggccagccgccttctcattgacgaaccgagcgatgcctacccgctcctccagagacagaaagaacatttcactggactggcacacggcgaacagtccggatacgccatgggcgatataccactcgaccagtgcttctagtgcggggtagtccaccgcgccgtcccggaagggcgtcagcatcgtgggccattcgccgcctggaaaatgatttactgccattgcatttacactccttttttcatcgtcgctcccacaggtagtgcggcatcccccagaaggatctgccaataggcgatattctcccgcttccaagtgtaggtcacatggagctggggaccggaggccaccacggcgggataggcgaactcgccctttccgctgtcaaggtccagaagtttgtcccatgagacgccgttgtccctagagactaacaggctcataggggtgcgcgccccccagttgtcggctaccgggttacaggccagcaccagccatccgttggggaggcggtccaggtcgatgccgctgttgttattggggagaccggtgtcatagggaggacaccaggacacgccgccgtccgtggaatcgctgcggtatatgctgccctccgtggagcggagcagcatgtggaccgtgccaggggaggactcccacagggtgggctgaatgacgccgcgaccgtggaaggactgctccgacaccgccacgtcgctctgctggaccgtccgggtaccatcgctccgcagcccctggatcaagacaggggtggagcgggtccaagtcaggccgctgtcgtccgagcggtcggcgtaggcggtccagggtccgagctcagtggagttgggggcgaggagccggccggaagaaagctggatgaccttgcttcggacggggccgcggcccccgctctggtcaccggggaccagctcccgggggatgtcccaggtccgtcccccgtcccgagaggcgcacaccatggtgcgccattgggcgatcaccgcccccaccttgtagtataggcggatggccccgtcggggagccgctggagcaccgggttccagtggggctcctccacatgggcgatggggaccgggacggaccaaacgccgtccgcccggcgggcagtccaaatactggtgtccccctccccttcataggaaccgccgaaccaggcactgagcacagtcccgtcgggaagaggcagtaccgtgctggcgtggcacatggcggtgggcagccgggagcagatcatctcccggcgcaggatctcatagttcatggtatgaccccctgttccaattcagcggtagatgcgctcccgcatgcgcagggccgcattttgcaggatgccggcgcactccatcagcttctcgtccgtcatggtaatggccgggccggaggtgctcaccccggccaccagcttgccggcagagttgtacacaggaacacccacacaccgcacgttggggtcccgctcgctgttgtcgatggcgtagcccctccggcgggtgcggcggagctcctccacgatggcgtccaggtcggtgatggtgttgggctgaaagcgggtgcgctccgcggggatatgggcgagccactcctcctcgggcatgtgggccagaatggctttgccaatcccagtgcagtagaagggggaggtctcccccaggatgtcccggtaggggaggacgcccatccggttggccgggtgggccacatagaggtagaggacgttggtcccgtaaggcaggccgaagtagacgatctcattggtcttgccggccgtgtccaccaggatatcatacaccgcgttggggtagcccaggttctggttgatgatgaaggcgtactccaggatcttcagacccagggtgtagcgcccgtcgggcagccggtccagataccccatggaagtgaaggtggacagaatgttgtggatgttggacttggtcaccccgatccgctccgccagctccgttacccccaggaccggctcctggatggtgaagcaggagaggatcttcagggactttgccagcgacttcacttttggttctgaacattcatccatgacgcccacctccgttctttaatagagaacacacttccttattgcaatactattatataaatctgctcaaaaaaaggcaagagggcaattttttttcggcggaacgccagcgaaaaagggagaaaaaggagggttttgcgactggcgttttctgatcgagaaccacctggaagctttttttgacagggaagattttttgccgcttgcggagggggagggagggagattataataagggtgcaaagtcctctgagggcccgctgggctgggaccacaacgaaaggagaagacaagttatgatctacgacagtttgaagcatatggaggcgtatcagggtgtccatcccggtatctataagggactggagctcctaagggataccgatttctccaagctggaggacgcccgggtggaggtggacggagaaaatctgttctatttgttgcagagctacgagtccaagccggccaacgacactcccgaggcccacaagaagtatgtggacatccagtttctgatctccgggcgggagaagatgggggtcggtgccctggaggacatgaaggaagaggtggaggcccacccggagcgggatatctggttctaccacggcccgctggacgagatcaccctgggcggggacaagtttgtggtcctcttcccgggggatgctcatgcccccaacatcgcggtggacggacctgagcctgtacgcaagtgcgtggtgaaggtcaagctgtgacaacagacagactggcagggacagcctctgccggagggagagaacggccgcccggtcctgagaggaccgggcggccgttctgcgtattgggataaagaatgcggcgcaggtgttaagaaaatgacaag

SEQ ID NO: 13538 - DNA, 6188 bp, Unknown
  gut microbiota DNA sequence
cacgctggcaaaggagaagcacatcatggaactcgaactcgattttaccgccttcaagaagaacctgcgcgacctgattgaaagcaggggcctctacgccaaggacatcgccgcagagatcaacgtctcgacgcctaccctgtcgagataccttcagggcgtccgtgaacccgaactcaagtacgtcgttcggctcgcccgctacttcggcgtttctgttgactggctgctgggcctcagcaacgaccgctacgaggcagtccccacagaagtccgcgagtttgccactctgtacgctctggcctcgccagatgaccgtaccatcgtcgaaactgtactcaaaaaatatcgagaggagaactaaccatgatcttcggcaaagacttgggacgttctgccttctttgccgaaatcggctcagaggtcgaacgtctggacagcatccccagcaactacacgaacctcgtctgcatcgggcagggcgtcagactcaccgataccgtaggacgtgagtattgcatcgacctgttcatctcgcccaccggctgtatcgccgttcggcttcctcttccccttgccggtgcgtcgccgaccgacgccgatcccaagcgtctacgccgtgttgcctccattgtgcgggcatggagcgtggagcagctcaacgaggtctgtgccgaccatttctaccgcgccgaaggacaggctgccgacatcatcgacgtcctcgttcgcgccggtcttgcgggtttctccgacaaaggcaatgtcagcaaggctctcgccgcaacgctggctgatggcgaattgctcttcgaggtcatcgactcagcctccgcacacaaggtctttaccagccgtgaactcattgaccgcttctctgccgtaaaaggcgttgacccagacgacgtgaccgagttcatcggtgccctcgaagtcatggacggcttcagcgccgtctccatcggccgcgagatcatcgttcaatatgctccgctcggcgacggccgcccgtaccagctcttcaagttcaccatcgggcagcatcgctcggacgtggtggccgagccccgtgtcacccgataccagctccagagcaacgggcgaggtcctgcagaggccgacagtttcttcgaggccctcattccctatgcggacacagcctcaatgcagcctgcacccgacggctccatcagtgtcttgcctctcagcattgacgccctgatggatggcacgatggggcttgtggcagcggccagaggcttcgcaaaagcagtctcgcaataaaaacacatacggggcatcgcagcagcggtgccccaaaactatatctaacggttacgttacgtttacggtataggttacggttacggtatggttacggttatacacggaacgtccgtggatttttggtcggacgttcctatggaatatcccgaaaaaggaggacttcgtatggcttctcgcatcgccgagaaactggccgcgaagaaggcggccatctatattcgcgtctctactcattggcaggtggacaaagactccctcaaagttcagcgccgcgaacttatcgcctatgtcacgctggtgctgggcatcaccgactacgtcgtgtttgaagaccccggctactcggccaagaacacagaccgcccagaatatcaggctatgatggatcgcatccgcacaggcgagtttacccaccttgtcgtctggaagattgaccgtatcagccgcaacctgatcgacttcgccgccatgcacgacgaactgcagtccctcggcgtcaccttcgtctccaagaacgagcagttcgacacctcctccgccatcggtgaggccatgatgcgcattatcctgatcttcgccgagctggagcgcaagaccacagccgagcgcgtcacggccgtcatgctctcccgtgcctcagacggtcaatggaatggtggccgtgtccccttcggctattcgtggtcgaaggaaacaaagacattctccatcgtccccgaggaggccaaggccatccgccgcatggccgaactgtacgagcagtaccagtccttgctctatgtcgccaagtacctcaacgacgccggtatcgtcacgaagacgggcggccaatggacgccaaccacggtgcgcaccatcctgacaaacccgtggtacatcggccagtatgtctataacgtccactcagacggcaagggcatcgagaagcgcgactctgacgaatggatcaccgtcgagaaccaccacgaacccattctgaacgaagatgtattctgccgcatgaagttcctgctgactcggaacaagcgcggcggcgttccctctcacaaaacatacgtcaggaagaacatccacgtctttgctggcctgctccgctgcggccagtgcggctccaacatgacggccaacctcgaccggcggcgagcgaacggcttccgcccctcccaatacgcctgtggcagccggcggcgcaaagggacctcctgcaccaacaagtacatctccgataccacgctcggcccgttcgtcctgaactacgtcgccaacatcatcagggcctccaagaactcctctgaggccacgacgcccgaggttctggagcgtaagctgctccgcggcgaagcgttcgaggacgtggcctccgtcagcaccgactctctgggccagcttctcgatgcgttccgctccgccggtgacgccgtggagtaccgcccgcaaatcgccttctccggtgaagataacgctatccgcgagatcgacacactccgcgctcggcgccgcaagctcgataatgccctcgcccgtttgaacgccctgtacctctacgatgacgaggccatgccagagaaagacttcgtcatgcagcgcggccagatcaccaaacagctcgaagaagtcaatgcccgcattgaggaactgcagaaccaagagtccagcgaagaactgggcgacgacttcataggcaaggccagctactacatcatggcgaataagctgattgaagaccgctacattgactacgagaagtacatccgagccattgacccctccatcccgcacagcttcctccagcagatcatagaccacatcgtcgtgaacgatggccgcgtcacctccatcacattcaagaacggtgcgacccacacattcacctacaagacatgagaaaagccccggcctcatatactgaggtcggggccatcttatgcagtctatgcagtatcgccgcaacattatgcgtcaaaaaagttgttcaattttataagcatcccctcaaagctaacgatgcgtgatgcttttcggttatccacgcggctttttcaggtttttacggcggttaaggcattttccctgaaaacccttattttgcgggcttttcgccgttttcagccttggagggcatcacgtctccaatgaacatcgcatctccgaaggagaaaaaccggtatcgctcccgcaccgcctcccggtaggcggccagcacgtgctcccggcctgccagggcggagaccagcatgatcagcgtggactccggcaggtggaaattggtgatcagcccgtccagcactttgaagcggtagccgggatagatgaagatgttcgtccagccggcagactcctccatggtcccgtcctccgctgcaaagctctccaccgtgcggcaggaggtggtgcccacacagatcacccgccccccgttcttccgggtctcgttgatgatccgggcggtctccccggggaccatgcagtactcggagtgcatctcatggtcggtgatctcctcctccttcaccgggcggaaggtccccagccccacatggagcgtcacatagcacagcctgacccccatctcctccacctggcgcagcagctccggcgtgaagtgcaggccggcggtgggagcggcggcggaccccagcactttggagtagacggtctgataccgctcgttgtcctggagctccgccttgatataggggggcagaggcatccggcccagctcctccaggatctccagaaagatcccctggtagtggaagcggaccagccggttcccgccgggcagctccgcctccaccgtggcggtgagcttcccctccccgaaggagagctgagcgccgggcttcatcttccgccccggccggaccagacactcccacaggccctcccctttgtcgatgaggagcagcacttcgcaggcgccgccggtggaccggcggccgatcagccgggcgggcagtacccgggagtcgttgagcaccaggcagtcccctggtctcaaaaaccgggggagctcatagaaatggtggtggcccgtttcgcccgtgtacttgtccagcgtcagcaggcgggaagcatccctgcgctccagaggagtctgggcgatcagctcctccggcagttcaaaatcaaaatcagatgtcttcaatgtacttccttgtcctcttttctcttagtccagggcatcgacctcgacccccgggaaatagaattccacgatctcatcgtagtcgaatccccgctccgccatggcgtaggcaccgtactgactcatgcccagctggtggccccagccggagccctggaatacatactggctgccgctcaccgtgacctcggtgcccgccacagcgcctgtgtctcctccggagctccccgtctgctctcccatccggtcgatggaccccgccccggagatgacatacaggtcatcccggtcctcccggctcagggctcctgttccgctgatggtgtagaggcggctcctgccgctcagcccttccccgctcaggctcccgccggagggggaaccgggctccgcctccgccccgttgatgatgaagcggatggagggcaggccgaacagattgcgcaggtcagtgctccgctggcggatggtgctgctctccccgttggtataattgaccttcacctggatcacgttgcccaggtccgagtaggtcagggtcagcgactccaccgaggcgttcacgcccccccatttctggagcaggctggtcagctccgaggccgtatagcgcacggtccaggaggagtaggaattcaggctggccacatcctgctcataggggtcctccaccccgcacaggtagggatatttctcccgggaggagccccagacgttgtacacgtcctcgctggccccgccgtggctggaggagtagaacgcctcgatcaccgtgccgtcatagagggcgtactcccccgctgtctcctccaccgcccggtcagtgcggtctgtggactgatagctgctgacgttggagccggccccccggtagacctggcagtccgtggaactgcacacgtcgaagtggtgggcgctgtgcttgttctgagagatgttgttgtaggcatagctcctggcgcagatggcctgggccttcagcgcctccaggggccagtcgttgctcatctcaaaggggatcacccccttgatgtaggtctccatgtccaccacgctgaccaccgtcaggtctccgccgccaatgcgctcatagcggaagccgccgtggtacttgtacccctggaaccaggtccggacctcatcctcgccggtcacgtccggcatgatgcccagggccaggtcctctcccccgtcaaactggaacaggacccggtcggtccccgtctggatcactgtgacggcataggcgctggtccccacgacctccccttcgcccagctcatcggcggcgtccagggcgtcctccttggagaggtaggctcccacccggacctgatattccccgtcgatccaggccacgaagccgccgtcgtactcctctgcctcctccgccgcgtcgtcaaagcgccggaaggagtcgatgagcaggtggaagcagcccaccacagtgcccccgttgtccgagttggagtagatatattttccgctgctcctgtcatagtagaaccaggtgttctgggctttcagcacggtgatctgggtctctttctcgtcggtctcccccagctcctcgaaccgcaggtcctcgtcaaagtagccgaagcggtagccggagccgtagcccgtgttgttctccaggttggcccccaccagggcgccgctgccgtaggccaggcccacccggaccatctcctccccccgccgggccgccccggccgtggggacgcacaggacaaatgcaagagacagcgct

SEQ ID NO: 13539 - DNA, 23774 bp, Unknown
  gut microbiota DNA sequence
agggcgtgctgcagctgcttcagtaatcccaggaaagttcatacgcaaaagagaacggccggtggccgttctctttttttgcctgttaaaaaagccgcgcagaattttgtgccatcatgggcgaaagcgtccagatccgttttctctggccgcgtgtgcgtggaagaaaacacgccccgccccgcgagtgcggggccttttcccggccagcagacaaatgatgcgcgcggcaggctgagaaatcatttgtcccctttgaggtgggccatcagaacaccggcaatgttctcgcaggaggcctggacagccaccgcaccgatatcataggcgaccatgggcattccgtagaccacgcaggagtccttgtcctgaccaatggtataggcgccggcccggcgcatttggagcaggccgtcggcgccatcccgtcccatgccggtcatgatgatgcccaccatagggcacttcacagccgaggccatggaggagaacagggcgtccacggaggggcggtggccgctgaccttttctccgggcaggcaggacagggtgtagcggcttcccatacggactacccgcgcctggaggtcggcgggggcgatcagggccaggccgcggcggatctcgtctccgttcaccgcctcccggacttccatccggcacagccggttgagccgctccgcatacatcttggtaaaacccaccggcatgtgctggacgatcaccatgccggggatatcggcagggaggcgcttcaggacttccagggtggcttctgtgccccctgtggaagcgcccaggccgatgatggtgcgatccagatccgaacgccccccgacgccggcgggagagacggaggacagagagggggcggcgggagagacagcggcgcggcggcggaccttggcgcaggaggcgaccacgatcttttgggcgagggagtccagaaaggactgcttgctctctgtgccgtccggcttccggacaaaatccactgccccggcggccagggcgtcaaagaccttgaggttcagagacgagaccaggatcaccggaagaggggtgacagggagcagctccttgagaaaatcgatcccattggtgcctggcatctccacgtccagggtcatcacatcgggcgcaagactggagatctttcccctggcgtccaaagcgttgaccgcatagccaacgacttcgatattaggataggaagaaagcccgcgagtaagaaaggtgcgggcgacagcggagtcgtccacaacgagaacgcgaactttgcggttgatcgagagcatggtaacgtcctttccggcttgcctgaataaaaagccattgtcactttttgcggtagactgcaggggcaactgtctgaaacaggggattctggttcagggattcggagtggctgatgaacagataggcccctgggttcatggcatcgtaaaagcgccggacaagggcatctcgggtgggctgatcaaaatagatcatgacattgcggcagaaaatgacatcgaatttgagacggaagcggatcggctccatcagattgaaggaacggaatatcacgttgtcccggatgggctgggagacacggtagagcccccctgtcccctcccgctggaaatatcgcttgagccaggcgtcgggcatgtcagcgggtggctggtagacgccggccatggccttggacaaggcctgctgagagatgtcagtggccagcacccgggtatcccactgggaggcccgggtgccaaaaaattccttgagacagatggaaagcgtgtagggctcttctccgctggagcagccagcgctccagatggagagcacctggtcccgctgatgctttgcggagagctcggggaggatcttatcctgaaaataggcgaagtgatcctgttcacggagaaaaaacgtgtaattggtagtgagcttgttcagcaccagctccaggtccgcaggatcacgggtggaaaacagatgctccagaaaggtgcggaagtccttatagcccagctccctcaaagaatgggagagacgactgctgatcagctggcgctttttgctcaggtcgatgccgtaattctgctggatgaactggaccagtctgtggaagtcggcgtccgatatggtaaagtcatgggaaaatatatccaagataacaccttctactttccgggcatcaggtatgggtcaggatctgagggcagtcaaagaccagcatggtctgcccgtcctccagggagcacatgccggagaccatgtcctgggtgttctgtgccggagcggggagaatggcggatttctcaatgtccatcattttctgtacggtatccaccagaatgcccaccatggtgtcgttgatgttcagaatgataatacaggtgtcctgctgggccggacagcccagcaggatgcgcatgtctacaataggaatgatctgtccgcggaggttgatgatacccaggatatagctggggaccagggggagcagggtaatggtgtgattcgtgatgatctccaccacatattctgcctttactccaaacaggagctgatcggacaaaaagagaagatatttttccgtctgggagtcaaggggggcggaaggtgcctcctccatccctgcgggcagaagtaaagcgtcttgtgccatagctggcagacctcctctaataaaaatgggtcaggcgggggtgtaaaggttggagatatccaagatgatgctgatattgccatcccccaggatcgtgcatccggcgatgccgctctgcttgatgttgaagcgggagagatagctgggcagaggcttcaccacgacctgctgctctcccagcagctcatccacaaacaggcagtaggagagctcgccggattccagccagatcaggatcccatcgctgatctgggagcagcccccctccagctggtagcggtcccgcatccggataacaggataaaaactgcccatgcatttgaacagctcccccccggaggcgtcatggatcaggtcggagtcgttgaccttgaaggactggcggatgttctgaatgggaatggtgaagatggaggaacctaccgagacctccatgccgtccatgatcgccatggtcagggggatcttcagcgttgtggtcattcccctgccgggatcactggtgatgaccaccgtgccgcccacgtcctccacattccgcttgaccacatccatgccaacgccgcggccggaatactccgtcacctccgtgttggtggagaagcctggggccatcagaaagttgagaatatccctgtgggaatattccacgtccggcagagcgatgccgttgcggatggccttgttgagcacggcgtcatagttgacgccctggccgtcatcccggatctcaatgatgacctcgctcccggtgtgccgtgcggataggatgatctcacccaccgggtcctttccggcatcgatccgatcctgaggggtctcctcgatcccgtggtccatagagttccgaacgatatgcatgatggggtcgctgatactgtctacgatggtcttgtccacctcagtgtcctcccccaccagggtgagcttgacctgtttccccagctttttgcacatgtcgcgcacgatccgatgcattttttggaacgtcccggagactgggaccatgcgcagggacatggaaacatcctgaagctcatccgtaagtttgcggagctgacgggcggatttggtgaaggcatccagcttgagccccttcaggtccggagaggaggtgaccatggactcggtaatgacgatctcccccacaacagcggccaattgatccagcttgctcagattgacgctgatgagactttcgcggtggtgagcgccggcatcggaagaggactgagaagagggggcgggcgcagcgggcttgggattggcggtggttttctgctccgggggctccggggcagaggccttctgctcggcggggagcgcctgcggggcaggggcaggaatggagctggactgcgggcggtcaaaggcctgataggtccggacagagcccgcgcccgtgactgcatggacggcattttcacggtcctctgcatcccggaagtacatcatgaagccggagtcgatgatctggcccgcggtgctgggatctgtggagatgtcggcgggagaaaagtgaaaattcccctccccgcagatatcacggaccgcattgaccagcataaaggcacgggcattttccatgccgcagccctcatcaaaaaagatttgaagcgcataggggaaatcaggatattctgtcggctgatcctgggcgaccgcccccgcctgccctggggaagggggctggggagcaccggtgttttgaatttgctggatcagggtattaactttttgcagcaagctgtcgatattttcagtaaggggttgcccattttcgatatgatcgatctcctgacggaagaagtcgatggtctggaaaagcagctcgaacagctcagggcggttggcctctgggacgatgtccatggacttgtcccgaatgatggaaaacaggtcctcagcgcggtgggcgatcgtcatgatggagcgatactccatcatggcagaggagcctttgatggtgtgcataatacggaagatagtattgatatcctcctcagagaaggtgtccttttcctctgacgccagtacgatactgtccagctgctccagcagagtgtttgtttcataaagataggcgtccaaaatgctgtcgttcccagtactcataaagccgtatccttcctttgcagtttaacattcactctgtttatcgaccgtgagagagaaaaaataaggcttgaatttccaaaagacacactttgggcgctggaaatggtggaactgccgctgatgcagcgggaaagtccagacagatgcagaatagaaaggtgatttgaagtatggcagacctgctcggtgcgaccaatccggtcccaggctacgatggcgccagccaaaacagaagtcattccgccttgccgcaggtccaggaccccagggtgcagaacgtgccggacctatccagggtcagccgggcggacggacggacagagcagcagggtgccggcaaccatctggatgccggcaggctgcggtatgattccaatctgcagacctttttgcagcagctgcgggacgcgccggatctggccgcagtgctggcaaagaccgtggtttggatgcgtggactggtatcggcacccggactgtctgaggggatcgcccaggagatggcacagctgctggagatgctgcggatggatcaggagggatttcagcgcttttttctgaaccagatgcaggcggggaaccgattttccggaccgctgttctccctgctccgacaggcatatcagaacatgcccagcgaagggatgcgggaggctattcttaattttgcaaagcgctatggagatttttcggcggagcagcacctggcagagaatatgacgcttcggctgaagcagatggcagactatctgcccaaaagctggcgcggccagctgatggagctaacagcaaggctggaaaacggacttcaggcaggcagccggacgggaaatctgaagctgctccagggagagatcattccatatctgggctcctatgtggagcggacccatgatattgggaagctgaggactctgatcggacttctgatgctggatgtggcgcgctatgaaaacggcggggaggagggggtcctggccgccttccgccagctgagcggatatggagagatgctggccggactgaacgaacttgacgatgcggccctgctgcgcctcctgcgggagaacagcttcacaagagccgttcaggaggaccaatttgcccagcgcctggcccacacggcggcgcaggcactccaagggaagtatggggctgatgtccgggagggcttccaggaactggtgcgggcgttcctgctgaatgaaagcgtttttatgccgctcaaccatatgatcatcccgctggagtggaacggaagggcgatgtattctgagctttgggtagatcctgacgcggaggaccgggagaaggggagccgccagccgggccaagaaaaaattcagttcctcttcaagctggatatccagtcgctggggtatctggagatgacgctggccgcccggcaggaagagatcgaactggatatttatggtccggatgcggtgatggagtgcggcggggtggtcgcagaggaccttcgggagatactggcctcccacggattgtctggaaagaacgtccgcgtgatgaaacgggaaagaccactggctctgacggaggtgtttcccgacctgtttgagggaaagaggagtgtaaatgtcaaggtctagcagaggccagatccccggggagggggagcgggcggtagccctgcagtattctccgggaaatggggcaccggtcatagtggcgtcaggtatgggccacttggcagagaagatcgtggaagtggcggtggagagcggagtgccggtctatgaggacaactcgctggccacggtgctgtcccagatggaactgggacgggagatcccggaggagctgtatcaggcaattgtggagatttatgtctattttctcaatttcgacccaaaggaccctgagaaatttcggagagaacgaaacaagcagactggaccagccgcaggaggggaaaagacatgagacatcaatatttgatgatcgacagccgcgggaaccccgtggcccacggaacatctgatgacgggctggaaaagtcggtctgggagatccaagtggacagcggggatatcaagcgggtgctgtcccatgagtatgtcagcttggtgagctcatcggaaaaagttccggcgatggagggacggatcatccgccgggatggaaatatcatctcagtcgagtcggtccgaaggctgggagaagatgtgcggcgcaacctgcggatgccggtccggtttgagagctacctgtacccagtctcaggggaatggaagggcagactgcctattttgagcaatgacctgagctgcggggggatatcttttttctgcgcaaggacgctggcggagggagagatcgtgcagatcgccgtgccgatcacggctcagcccctgctgctgaacataaaagtgctgcggcagcgtccctcaggggaaccgatcccactgtttgcagcggcgtttgaggaactggtccatgaggaagaaaagatgatccgggaggcagtattcagtctgcagctgagcgggacgaccgggatctgagtgaagctgaaagagaaaggaagcagtggacagagatgaagagatggaaagagtttcgttttgaatatctgaggacggcggctgtcttcctgctgctgtgtgccatggcctgcaccttgatatgggcgctcccggcacaggtccatgcggactatacagagccatatatgaaaagaatggaagagctgggactgcttcagggggatgcagatggggatctgaggccgggagaccccatcacccgggcggaatttgtcactatcatcaaccgggcatttggctatcgatctgcggggggacatcccttccgggatgttccgggcaccgcatggtatgcggaagatgtagacatcggctatacggagggatatattacggggacctcccctactgccttttccccgaacctgagcatcacccgggaggaggcggctttcattctggcgaagaacctgatgatggaaccggcagtgggggagaacaccagttttgcggacggaagaagcatcagtacatggagccgaggaatggtctccgcggcagcggagaataacctgatcagcggttatccggacggcaccttccggccgcagaaaagcatcacccggggggaggctgcggtgatcctcctgaacgccgttggcaccccggtcagcaggcctggtactactacactgggagatgtttggggcaacgtgacgatcacatcctccggtgttactctgaaagataccgttgtggcgggaaatctgtacgtcactgcgggggtggaactgggtgacgtggtgctggagaacgtgaaggtgctgggggagatcgtggtcagcggcggcggcgtcagtgaagcgggcgaggacagcgtgatcctccgcaatgtggacgcccccaagctggtggtggacaacatcaaaaaccagcaggtctccctccgggtggagggagatggcctaatccagcaggccagcgtccggacagacgcctttttggcggacaataccccagccggacacggcatcggggagatcgagctcaacggagaaaacggcctggagctgaagctggcaggcaacatcaagaatgtggtcaaccgcacaccggagtctgcactgagcatctctagcggacgtgtggacaccattacagtggatgagaaggcagtggacagcacactggagatctcttccggcgcggaggcagatcatgtcaatctggatgttgggaccacagtcaccggggacggagacatcggagatctggtggtgaacgcaccggggagcaatgtgtccatgctgcccgatcagatcgtgatccggccgggggatacggccaacatcgacggagaaaacatggacagtgaggcagcggcagagtcctctgcagatccgcgtctgctctcagggtatcccaaaatcactgacctggccccatcctctgccacagcgcagttcagcggcaataagcgtgggaccgtgtactgggctgtcacctcggtgacagatggttcggtggggacggatgagctgatcgatccgccctcctataccacgaagatcgtggcaaatggctctgccgctctgagcggagcgggagagaggtctacggcaaaaatcagcaagctcgtctccgacggctcctactatctttccgcggtgctggtggatgccagaggggatcagagtccgttgaaggtgctctccttcacgactccggacaatacggtgccaggctttgccgatgggtacccctatatgtccaaggtcacaaatgtgtctgcgcaggtgactgtgatggcgaccaagagctgccggctttactgggcgctgctgcccaaaggcgcgcaggctcccacggcgcaggacttcaaggccaacgccgtaacaggaaatcttggctatggaagcagagatgtgaccaaaaacaccgcctattcctttgatgtgaacaacgtggcactggaggaactggagagctatgatctgtatctgtggctcactgatgtggaagggggacagagctcccgggtggagaagctgtccttcacgactgtggaccgcaccccgcccaagttcaacaccaacgccacagtaaacaaggtggagcggacctcggtgggcctctatgccaatctgaatgaggcgggaaccctgtattgggtggtggtggaacaggggacagagtaccccaagcctctggcggggcagtccggcccggtggacctgtccagtgatacggccaagatgcaggtttctgcggggatgaacgccctgaaaagcggcaaggtgaacatgagccaggacaaagatgtgagcttcaatgtcagcgggctcgacccagagaaggcctatgacctgtactatgtagcgcaggacaaagcaggcaactactccgccagagttcaggtgatcaccatccataccctggaccccagcgcccccaccgtggtccaggagtttacccgctacaacggggacgaatcggggacgccttatccggacacagatatccggctggtgttcagtgaggaggtccaggacgcggcagccaatgtgacactgaaggagtattacgaccgggtgactgccgccaagggggagacggagaaggaacaggccagaacggccctgggaaatgtgctgagaaacagcatcaagctctatgtggacacagggagcgggcgcccggagctggtggccgatggtgtggatgccgcagacaagacccagggaggctgggtgatcgactaccgttatgccgaggttaccatggaagagggaaaaacggtggtgatcttccggactgcggacagcgagaaggagagtgctctgaatctccagagcggtgcagagtaccactttgagatcgaggccaacaccatttccgacacctcagacgccaaaaatatcatgggaaagaccaagctggataccttcaagaccattttcgcagtggtcaacctgagcaaccccaatgagtccacgctggagggaacgatcacagactaccatgacccggggcaggagatccagctgatgggggatgacaagctggtagatatcagctggctgctggcccccgccactactgagagcgtgccggacaacgtggactgggatatgatcatctggtcagacaccagcattgcctttgatctgtaccgccggaccaatcttgctgaaacgccggggaaatgggagcggatcggcgaggagatcgagctgacagtgccggacggagacgaccggaggggcgtcagcctgactcggatcctccagaagggaaacaacccccagttccagcagttgaatcagctgctggaggagaaccagtatgagtatgccgtccactttacccgggtgggcaccctgggggaccgggatacctggagccagcgggtaacgatgggggtcactgtggtggcgggcagcaccagcgatctgggaagcctggccaacggacggctggacagctccgcactggaggaagcgctggctgaaggggtgaccaacattggacagccggacgactttacgctgcgcaagcagttcagcgaccagaccccgcccatctttgtggataaccggccgaactttgagacgggagattccagcgtcaaaatgtacctgatgctggaccggccggggaccatctattatatggtggctccatacgggacggtaactacagagggcgagaagcgggacggctcaaagaaatatcatttcagtaccgataaaacagactacgaagcgcttccaaaaaatggggagaacgatccgggcagcggcggaatggaatacccatttaacatcaccgcacccacgcccttgtctatcatcaacgcggggaatcaggccaacgcacgcatcaagcacggctccattcagggcggcgccacagaggtggagaagatcgtccagaatctggaagtcaaaacggactacatcgcctattttgtgatccagggcagctcctcccaggtctattcggaggtctatgcctaccggttcagcacagacgatgtgactccggcctacatcacgatgcgggcggtcaacccggaggtggagttcaccacctcccaggatgccaccctgtactattccctgtttgcctccaacaagctgccccccctgtttgggcaaaacctggcgggaaatcatctggacccagagtaccgagataaggttggaacagagataactgacctgacgctgctggaggccattcaaaagaccatcaacggtgtgacaggcgaatcctattttgaccgctatgccagtgaggagaccaaggagcaggtgcgtcaggccatcaccagccagaccagcagcgaggcgctggacaagggcagtatccccaatatggcgcagaaagagccccaggcccatgactttaccaatgccatggacccggagagcgccactgcctatgtctgtttggctacagcccagaatgcgctgggcgggaagtggaccttcaaggcggtggacggggtgcgcatcccagacgaagacgcccctgtgctgctcaaggtgacgaccacggtgaccaaggtaaacgatgctgcagatcctgtacgggtctccggaactgtgacgctccagttcagcgagaccatctaccacatcaacgattccggcaatccggacaccctccgggccatcatccagcgcgatgtggacaaacagaaggaagtggggttcctgaatctggtcaaccagagtcagagcaatttgaagtacagcaaggaatcgggcaataccaccaacaccattacgctggatttctgggatgcaccggtgggggccacgttcagcttctgcaacacgggccatctggcggacgcatccgccaacagccgccagaacgacagctatacgctggagctgcagccgacagaggggatcgggctgatcacaggagggaccacctatcgctttgtggtgacacagggcaattatccgggaaactaaaggaaaaagccgacatgggcgggcaaagaattgcccgcccatggcttaagatccgggagggatcatgatgaaaagaagtatcgcgaacaggatcgccgccctggcattggcactggtgctggcgggctctttggtgcccggggcctgggcggcagtgggggagccggagggcggcggacagctgaccggtgtgacggtcacaccctccaacctctccatgaaagtgggggagcgggcctctgtgagggcttcggccgccgggctgagccaggaccagatggaagacgcgcggatcgagtggtcccttgagaacaacgatccggagcgggtcaggatcgcctctggtcgggacagctggaccgtggaggtggaggcagtcaacaccgccgagaccacggagacagacccggtgaccctggtggccactgtgacctgtcagggcggcgcggagagggacacctgcgcgatcactgtggttccggatcagccggccggccttcggatcaccccggagggggatcaggagctggagccgggtgagaccctccagctccgggccgagatcaccccggcagatcaggctgagcctgtgacttggtccagctcggacccggatgccgcggaggtggacagggacactggactggtgaccgcggggcgggaaccggggcgcacaaaaattacggcccggtcgcagagcggcctgacagattcctgtgaggctgccgtgcggggcatcgttctgccggagaaccttattatgcgggaaaatgaaaatcagcgcctgatcccggaagtctatggcgcggcgctggagcgggaggatgccgcctggaccagcagcgatgagaggatcttgaaggtggacaatgggtatctctatcctgtatccgtgggagaggccacggtcaccgccgagatccgggcgggcggccgcctttatactgcttcctgccaggtcactgtagaggccaacaccgctgatgtgatcacggcagctgcaggagcgggggacccgctgcgctttgacgagatccagagagagttggagcgggagtgccgaagcgtgctgggaagctcactggactatgtgggcggcctgtgggtgaatacccggcagggcacgctctactatcgctataattctgaaggggatactggagccggggtggggaccagcgagaactactatgccgatccctcagccagccagatgggcctgggcgatgtggcttttgtccccaagggagatttcagcggaacggcggtgatctcctataccggctatgcaagggatgggggctcctttcaggggaccattgaggtagaggtggaggagacagaggagatcgagtatgctgcctccgccgataaggcggtccagtttgacccggatgacttcaaccgagtctgccggaaccggacaggccgggatctgagctatgtggaattttctcatccggacagtggaaagggaactctgtattaccgttatatctccccggccaatccgggcagcgaggtagacccctccaaggagtacaagcgttccggaactcccagtctgtccgatgtctattttgtacctgagggaggcagcggtcaggtcgtgatctcctataccggatacaacgtctacggcgactccttccgggggaggatcacgatccggatctctgaggccagcggtcggggcgacctgaattattccatcgctcaggggggacggctgaacctggacgagagtgatttcaatgacctggccaaacggatcacgggatatgctttggactatgtccagtttgaactgcctgcttcttcagaggggactctgtattacaactataccggaaacggcgcctatgacagccgggtaacagagggacgcagctattaccggtcgtcttccccttacctcagacgggtcacctttgtggcagacagggatttctccggaacggcggagatcgattttaacgcctgggatacaaagggaaaccggtttgccggtactgtggaggtggccgttggccggggcggcaaaggagatatccgctattccgtccatcaaaatggaaaagtcacactggatgacaacgatttcaacgcgctgtgccgtgaactgacggggagcacgctcgatcatgtcagctttgaccctccccccgcagcccaggggaccctgtactatcgctatgataacggagattatgacagcaaggtgaccagctctaaatgctattaccgctccggaagtccctatctggaccaggtgaccttcgtgccagcccgaaatttttctggcgtggtctccattccctttaccgggcgggggacgaatggagaggacttctcgggccagctggagatcggcgtggatactggatcggacctcatcgagtaccgggtgaagcccaacagctttgtcacctttgacgatggagattttgacgatctctgtcaggagatgactggaagccggctgcgctatgtccgcttcgagctgcccagctcctccaaggggacgctgtattacggatatgacgatggtgactatgacagtaaggtgacggagtccaagagctactaccgtgggacagatccctatctggaccgggtgtgctttgtccccgctgaaggtgttttcggagcggtggatctggaatttaccggctggagcacagatggcggcaaatttgaagggactgtgagaattacggtggaggagccgaaagggccttctgtgatcacctacgcgacagacggccgcccgctctccttctacgcccgggacttccaagaggcatgtgaggaccgcgggataggcggactggcctatgtgcgttttgatacacccagcagcagtgtgggaagactctattttcaataccagggagcgggggaaagcaatacagaggtccggatgaccaccagctattatccggcgaagtcccctggaatttcggagatcacctttgttccgaaagtgggctatcaggggacagcaagtatctcctatacaggatgggacacaaaaggaaacgaataccgcggtcggatccagatctcggtaaggcccgccacagcctcacggtatttttgggatatgagctcctttgagtgggcggttccggcggtggatctcctgtatgaaaacggagtggtccacgggacgggaaatgggacatacagccccggacagcagatcacccggggagactatgtactgatgctctgtcaggcgtttcagctctctgggcagggaaaggctggattctgggatgttccccgggacagctactatgcccaggctgttatgactgcccaagcgctgggcattacaggcggctatccggacggagggttccatccaggatcaccggttacccgccaggatgctgcggtgttcctgatgaaggcaatgcaggcggatggatggagcctgggcagcggaaatgagcagatgctcagccgtttccgggacgaaagcagcatttcagactatgcgcgaagcgccatggtagttatggtggagtatggagtcctgtcaggaacagcagatcagaccataagtccccaaaaggcgatcactcgcgctgagatggctgtgatgctggccaacgcgctgaccctttgagcgttgaatatatgagaataggatccctgccggacctccgtgaataaggaggtccggcagggacttttctatgcagcagggcaggcagtgaaatagacttccgtactgggactcataatgcatgtaaaaacattcactaaaaacaagggaactttttgtcccacctactacaatagatgcatacctcaacatgaaaaaagcgattgggaggagaaattatgagtctaaaaaatgcaggaaagaatgtctttgggaaagaagatggggcactggaagcctttcgccgatgtctggagctggatgaaaaaagcgaggcgacgatcagaaaatatatgcatgatgtcaaagtgttcctgacctttcagaaggggaaaggctccttccggaaggagcagatcattggatataaaaattggctgggagagcggtacgcggtgcgcagcgcaaattccatgctgaccgcagtgaatcagttcctgaaatttgtcggggcgggggaatgctgcgtcaagctgttcaagctgcagtaccagactttttgtgaccagagaaaggagctggggcgggaggaatataggcgccttttggagacagcccggcggaaaaaacagatccgtctgtacttcctgatcttgacgctgtgtgctactgggatccggatcagtgagctgcaatatattacagttgaggcggcaatgagtggaaacaccattgcaaaaaataaaggcaagagccgggtgatcctgatcccgcaaaagctttgcgatgtccttctggactatgcggcatggatagggatctctcacggcccgatttttattacccgcggcggaaggcccgtggaccggagcaatgtgtggagagcgatgcagaagctgtgcagggaagccggagtgccagaggaaaaagtatatccccataatctgcggcatctgtttgccagcaccttttacgaaaaagagaaggatatcctgcatttagcggatatccttggacacaaaaacgtcaatacaacgcgtatctatactctggcaacaggtgaggtccatcgagcacaaatcgaatctttaaacctgttcgttccggtgctgaatacggagcagccgtctcgcaataaaaaacaacgtaataataagttatgttgtttctttcgatgtgggcatgattagcaagcggtcaaaatgccgacctgtatttgagcggttttatcgatgttatcccggcaaaatgtaaactttttcggtggtttaatgcgatttttcaaaaaatatcttagaaaatgtaaaagaaaaaagaatggcctcttgtttttttgtataaaaagaggcaaaattcgacttgcaaaagcatggagaaaactgtagaataatagcgccaaaagatttttcagaacttttttttcgtatgtaaacaacataacttattattatgttgtttcttttttgtgcgcaaacaacatatcttattattatgtggtaacgggtttgtttttttgcagattttgtcgaaaaaccatgaaaatgaccgaaaaagaagagagggctggtcgataaaatggatggtctcagcagcaactcattcctgatgatgcagcgctccatggaatttctgtggagcaagcaatcctgcattttagacaacatcgcaaatgtggagacaccgggctatcaggtgaaatacgctacgtttgaggaggcgctcaaaaatgccgtcctctcctccgcccaaaatggaatctcctcttcttccatccggaaggccattgaagagacacccgtagtcgtgcgggaggcgcaggagagtgtccgcatggacggaaacggtgtcaatatcacagaacagtccgtggagctggcacgcaacgggtatcaaatgcagtatgtatttggggccatttccagcgacattgctacgcttcaggccgtcatccgcggctaatgagacagggagggacctaatatggcgtttttaagctcaatgaatgtggtgggatcagggctgaccgctcagcagctccgcctggacgtagtatcggagaacatcacgaacaggaccaccacgcggacagaggggggcggagcctaccgacgcaagatggtggtatttgaggcggagggagagcgcagcccgtttcaggcggcactggaccgtgccttggggagaggagcctccggcaccgcgggaggcgttcgggtaactgaaattgtggaggacccctctgactttaagctcgtctatgatcctgagcaccctgatgccaatgcggagggatatgtagagatgcccaacgtggatctgatgcaggagatggcggatgccatggcggccagtcaggcctattcggccaatgtgaccgcattcaatgtgctcaaacaggtggcggctaagggactcgagatcgggaaataagagaaagattgaaaccagcacctgctgatcaggtgctggtagtgcagatgcggaggagaaaacagtgatggattttcggcctatagaccccatccaacccctttttcggggagatactgcaggaggcgtcgggacagccggggacagccgggagcagggctcgctgtttgctgatatttttcaggcggcagtggaaaatgtgaaagagacagagcgggtaaagaatgatgcagaatatcgtttggcgaccggtcagatggacaaccctgcggagatgtccattgccagcagccagtggtcaatgtctgtcaatctgttgattcagctgaggaataaggctctggatgcttacaacgagctcatgcggatcagtttgtaatcacagcaggagccggagggagtaagcagtgcaagagaaggtaaagggattcttccagaagatcaaacagtggtggctgtctgcggcaaaaaaaacaaagatccttttaggggccggagcggctgcggtccttgtggtgatcgctctggtactggctgtgagcctgaaccagccctatacagtcctttttaccgggctgaaccagacggatctgaccgcgatcgtctcctatctgtctgataacggggtgacggattaccagatccagggggaggacacggtcctggttccggaaagtcaggaggagcagctgaaggcggcacttctgatagagggctatccaaactccggatcgggttattccatgtatctggaccacgtgagcagtctgaccacagaatcagagcgcagtcagttggcactgtatgacttacaggacaggctggcgggcgtgatccgcaatttttcctctgtgcgggacgcagcagtctttatcacgcctggagaggatcatacctatgtgctggacagcggcaatgtggtggaggccagcgccacagtgatcgtgaccatggaggaaggggcctccctcacagacgggcaggtgaaggcaatccgcaatgcggtcagccatgcggttcaggggctgagcatcgacgctgtggccattgaggaccagttcggcaacaactatactgcccaggacgggatcaccgatgtacaggacatctctgcgctgaagatgcgcctggaagagcagacaaacaacaagatccgcacccaggtgatgcaggttctgatccccttgtttggggaagaaaacatccgggtgagcgttaacagcatcgtaaacatggaccggacctataccgattccaccaactacagcggtgaggaagatggagaaggcatcatcggagaccgggtcttcgagcaggagatcatccgggggggagacgagacggccgggggtacggtcgggaccccttcaaacgcagatctgaatacctatgttcaggagcagctgaatgccaacggggatgaggtgctcatctccaacagcggtgaggagcacagcctggtggacacggagaaggtccaggtggagcatctggccggaactgtggcggatgtgatggtgtctgtcaccattaaccaatcggcggcggggggtgccagcgcaaacagcctctatccccatgtggcccgggcggccggaatcggcacagagctccagaatgaaaagatatccattctgatccaacccttctatcaggagggaacggcgccgatcccggtgccggatggcgttccggcatggatgctctatgcggcgctggccgggctgggcgtatttgtgatcctcctgatggtagtcctgctgatccgcaggcggtcaaagcgccgaaagaagctggatggagtgcagacggtccagagggcggaggagatcccggcgcctgctcccgagggggccgatattatggatatgaagacggaaaagagcttggagctgcggagggatgtgcggaaatttgcggaggaaaatccggaaattgcggctcagatggtgaaaaactggctgcgggaaggagatgacgcgggatgagcgaacctatatccaagggaggcaccgcccatcccaggctgactaggcaacagaaagcggcagcggtgatcgtctccctgggcacagacaaggcatcccagctctatcagtacatggacccggaggacgtggaacagattaccctggaggtggcaaaactgggttatctggattccagcgccactgaagacgtactgactgagtactaccagatgtgcatgaccaacaaggcggtgacagagggcggcctggaatacgccagggctgtactggaaaaggcgtttggccagcagacggctaccagcctgctggagaaggtgaccaagtcgctgaaaaaccgagaattcgcctttttgaacaaggcggatgagaagtccctgtatgcggctttgcagcatgagagaccgcagaccatcgcgctggtgctgtcctatgtggatgcggagaaatcagcagccgtgatcgaggagctggatgacgagcggcaggtccgggtgattgagaatatggccaatatggagagtgcctcccccactgcggtaaaaatcatcgaggcggagatggagaagaagttctccagcctgatgacagccagcaatgtaaaggtgggcggagtagactttgtggcggatgtgatgaacaatctggaccgctccagcgagaaaaacatctttgaccgcctggccgagtacaacgagcctctggcggatgagatccgcaagcgcatgtttgtgtttgaggacatcgttaccatggatgaccgttcggtgcagcggtttgtccgggactgcgatcccagagatctggtgctggcgctcaagggcgcaaacagcgatgtggccaacaaaattttcaccaatatgtcggcccgcatggcgcagagcatccgggaggatctggagatcaccagcaatgtccgcatccgggacgtggaggaggcccagcagcgcattgttgggatcatccgggacttggaggaacgcagcgagctgatcatcctcaagggcggaaaggacgatatcattgcctaatatttttaagagcttcctgaagccggctgtcaactcctatgtatttccggatgcagagagcctccaggtggaggagagcccggagcccgagggggaacaggcggaggaaacgccgctccaggagcaggagccggaagcgccccatactgcggcggcggatgccctgaattacgccaagatccaggcggagaagatcttggaggatgcccggcagcaggcggaggagcttttagaacaggagcggcagcacatccggcaggaggcggaggccgagaaggagctggccagagcggacggctaccggcagggctacggagagggactgcggcaggcccgggtggagggcgcggcccagatagaagagcatcggaaacaggaggcagagcgtatccgcagctttctggagcaggcggcggcagcgcgggattcgctgctggagcaggcccagaatgaactgtgtgagctgagcctggcagtagcggagaaggtcatccacatcagtctgcggaccagccgggatgtgatcgcccgtatgatccaggtggcgacagaaaagctgaagcgccgggagtgggtgcatatctatgtggggggatatgaggccagggatctggcccagatcaccccagagcttaccacagcgctggcagggctctcagagcatatcaagatcatccctatgtcagatgatgagctgggtgcctgtatcatcgagatgccggacgagatcatagacgccagtgcgtccacgcagctgaacaatatccgggacgttctcagcggaggctgacagccgggacagcggaaagggcacagattccatgtttgaagacaagatccagcaggtccgaaaggcggagaccatcagctataccggaaaaattgaaaatattgtgggcatgtctatcgaggcatcgggaggccgggcggcggtgggcgacatctgtcagatttacaacggagaatccggtggacaggtcctggcggaggtagtgggcttcaagaacgacaggatgctgctgatgccctactccgacatgagcgggatctcttcaggaaattttgtccgcaataccggccgcaggctgagcctgatgatgggagcctttctcaaagggcgggtgattaacgcactgggacagcccattgatggaaaggggcccttccatggaggtacgtccttctgtgtggaacggaaccagtatatcaatcccatgtcacgcccccctatccgggagcggatggagtttggcgtgaaggcgatagacagcatgctgaccatcgggaagggacagcgcatcggtatctttgcgggatctggtgtaggcaaaagcacactgatggggatgatcgcgaaaaatgtgaaagcggacatcaatgttatcgccctggtgggggagcggggacgcgaggttctggagtttatggaaaaggacctgggagaggaggggatgcgccgctccatcttggtagtggcaacctctgaccagccggctatgctgcgcaagcagtgcccctcagtagccaccgggatcgcggaatactttcgggatcaggggtgtcatgtgctgctgatgatggactcactgacccggttcgccatggcacagcgggagatcgggctggcagtgggggagcccccggtggcacgcggctatactccgtctatctatgcggaactgcccaagctgctggagcgtagcggaaattttcaaaaaggctccattaccggcgtctatactgtgctggtggagggcgacgataccaacgaacccatcgcggataccgtgcggggcattttggacggacacattgtgctctccagaaagctggccaacagcaaccatttcccggccatcgacatcaacgcaagcatctcccgcctgatgaatgacatcgtcgcgccggagcacctgactctggcggcccgggtacgggatgtgatggggatctatgaaaagaatgcagatctggtctccatcggtgcttacaaggcggggaccaacccgcggctggattacgcgatcagcaagattgacgggatcaaccaattcctgacccaaggggtgaatgaggcattctcctatgaggaggatctggaggcaatgcgcgggctgctgtgaaaaggatggaacggaaatgaagcggtttcaattcggtctggatacggtcctccagtataagcgccaggtgctggatggtgctcaaaatgaatacgcggaggcgatccagcgggtccggcagcaggagcggcggctgcgggaagcggaggcgcgccaccggagcctgaatcagcagtttcgcagggcagaggcagaggggatcaccattgcggacgccatgggctatgagatggggctgcggatgctggagggagagatccagcgtgaggagagcagactgcaccagcttcagacggaggccgaag

SEQ ID NO: 13540 - DNA, 23228 bp, Unknown
  gut microbiota DNA sequence
agaggcaggaagaactgcggatcgacgaactggtggccaatactcgtgcggtggaagccggcctgctctgactttcagcattgaaaggaggtgagaaagatgaatacaagtgatttgacgcttcaaatggcttatttggccggacagatcgcccagagcaccctgccggatatcggggtgtctgctggcaggccggagcagaagatggattttcaggcgcttttgaatgaaaagcggacccaggcagaccgggaaagaacggagcaggagcctcagaagacagatccgtcccaagatacagagaccggaaagacggagcagaaggacgaagatgtagcggctcaagcagctggacagggcgttccactgatgctggatttgagtgcggtcctggccggcggggggatcgtgccattcgtgggctgcgttgttgtaacggagcaggcagaacagataacagcacaggcgcctgctttgccggcagctgatgctgttgtggagggagagaaggctgcggagccagcactcccgcagaatattgagcgttttggtgaagcggctgtgccgcaaaaagcggaacaggaggccgcacctgggtcccttatctcttctgctggacaggtggagggtgaaggacaaggagcggagctccaggtcaaggcggaaggccagcacatggagcagcctgaggggcagtcggagcagagtggaaagcagccgggcacagaccagaagatggatgtggaggtcacacagctccagactggaggcgatcagaagctgttccaggggacggaggccgctcccgtaaaggtaggagacggcgcagtgctggataccacgtcagaacagttcgatgcccgactgagcaggaccattcgcagcatagcggaccaggggatccagaagatagagctgaagctgacaccggagcacttgggtaatgtggtggtggagctgacccggagtgagggcagcgcactccatgtggtgctgcgggcggagagcgaacatacagccaacctcctgcgagagcacctggggactttgggctccatgcttcagaacggaagccagcaggaagtccggatcgaggtggcccaccctcaggagagcgggcggagctggcagcagactgaccagaacggcggcgggcagaatggacagccccaggagcagcaccgggacccgaagcgggaggagtcggaaaacttccttcatcagctgaagctggggctgctggagcaggagaccgcacctgtgtaagaaaataaggaggaaagcacagtgagcagcgattttatgccccaggcgctggacagcctgctggctagtcagcgggccagcgtctatggcggcagcaagaccggctcctcggacaactcctggatggaggattatgagatccatcaaaagggagaggacatggggctggattttaccgactatctgcagctgatggtccagcagctgcagaatcagaccatggacaacaccacagatacttcggatatgctcaatcagctggtacagatgtcggtggtgcagatgatgaccacggtcaagaccagcattgacacgctggtggacgccaacacgctgacctatgcggcctccctggtgggaaagaccgtgacggttggagagtacggcgaggatggaaagctccaggaggtagtggggaccgtcaccgggacagggacgtaccagggagtaccagtgatctttgtagacggagagatgtacgccctcagcgacatcatggcggtggggaccctgccagatattccggagactccagatgagccggagggaggcagcggtgagggcggagatacgcagacgcccgagacctgagccgcaggggcggctgatccaaaggaggtgagcgcagtgatcgaccgtacagcatctatcacgggggccagtctggaagccgggataggccgaccgcgagccgttcaggccagaggcggggacggctttgtacaagctctgcgccaggagctggaacggacgggcggaagacagatcgccttttccaagcacgccatggagcgggcagaggagagggggatcgaggtgacacccaatcttctggaccggctgacggactctgtggagcgggcggaggccaagggggcgacgaatatcctggcccttgaccagagccttgcctttatcatcaacgttccaaacggccgggtcattaccaccatgtcccaggatgagatgaaagagaacatatttaccaacattgacggcgccgtgatcctgtgacaaacagaggacaggaccatttttggatgtcctgggggacgtgcgactgacgggcccccggcggcgcgaaacagagaacaccaaaagcaaaggagatctgaagcatggcattgacaggagcaatgagcgcgggaatttccgggctgaaggcacacatggaggcattgaatacagtgggcaacaatgtggccaatgtaaatacttatggttataagcccggccgcgtcacctttcgggaaagcatctattccactcaggccgctggttccgccggcacaaacatggtaggcgggaccaatccgcgccagaccggttatggatgcagcatcggcaccatcgatctggatatgacgaccagctctctggagtccaccgggatgcccaccgactgttttatccagggagatggttttttcctggtggggcctaaggatgtggatgtgaacaacgcggaggacgccaaagctctctccctctcaagggtaggtgatttccgatttgactcggatggatacctggtggacggcgcgggcaacgtggtatatggcttcgtgacctgcaatatggatggagctgatcaggcagatgaggccggtacgaacggagatgggatcagtacccagctggtccctatccgcctgcctatgaaggcggtgggagacgccgcccagggagatatcaagccgggggacgccctgttccctggtgtggatgacaccggacacaatgttccggcggaggaaggaacggacgcagagaactccaccggtgactgcatcgcctataacagcctgaagatcgacagcaacgggcaggtatcctgtgtcaacgatgataccggggacccggtggttgtgggctatattgcactgggaaaggtgacaaaccccaatggcctggagcacaccgagggcccttacttcaccgcgggcgacgcagcagggacgctgaccatcggaacggccaacagttctgtaacgggatacctgaacaatcaggacaagctgggaaatgcggacctggatcctgaaaacatgctggccgctggcagcaagaccagccttcaacctggctttctggaggcatccggaaccgatctggccactgagtttgccaatatgatcgtttaccagaggggctatcaggccaacacccggatcgtcaccgtgaccgacaccatgctggaagagctggtcaacatgaagcgctgagcgccgctggagtaaacagatgccttcccccgccggattcccggcgggggaaggccggaagcgaggaggcataatcttgatcgtattgcggaaaatgaataatgagcgctttttggtcaatcacaatcagatcgagtgcatcgagctgatcccggagtgcaaaatcgttatgatgaaccatgactattatctggtcaaggacaccgtagaagagatcatccagaaaattgccgactataacgcgaaggtccaggacatccaccgggagatcagtgttctggacaggcggagctgaggcggggccgcatcctgcctcccaatagagaaaagaagggatacgcgctatgaatattgtgtatatcgtcggcattgtgatggcctttttctttactgtgtttggaattgtggtcggtttcgatatgtcgacacttcaattcagcttcagtattggaaacctatcgaactttgtggacctgtccagtattctgatcgtcatcggcggcacactggcggtggtggtcgcctgctatcccaagcagatcaggtccctgccaaagcactttaagatcatgctccactccaacacctttgatccgcaggtgtatgtggatcagctgaccgagctggcacagatcgccagaaaaaatgggctgttggcactggaagagaaggggaacgagcaggaaaactccttttttaagcaggcgatcatgctggtggtggacaacaatgacccggagcgggtgcgcagtatcctggaaaatgagatcgagcagacctccgagcggcaccaggcagtcatcgccatgtatgagcgggggtccaatgcggcaccggcctttggcatgatcggaactctgatcggtctgatcaatatgctgaagaacctggatggagcggatatgaactccctggggcctgacatggccgtggctctgatcaccacattttatggctctctgctggcacatgtggtattcaaccccattgccgccaatctgacggcgcgggatgaggaggagatcctgtgccgccagatcatcatggaggggatcatggccatccaatctggtgagaatcccaagttcctgcgggagcggctgctgacctttatgaatgagaagcagcgggaaggcggagaggcggcagagggagccgatgacggaggcaaaaaacgccggggaaaaaagaaatgagcttcaggcggcttcaaggaggcgggacccagaatgaagagaaagaaaaaaagcggaagcggcggagcgaactggatggacacctatggcgacatggtcacgcttctgctctgcttttttgtaatgctgttctccatgtccaaaatggatgaatccaaatggatcgccctggtccaggcactcaatcccagtgcagtggtcaacgggacgagcatggaggagccgcccgagggcagcgtcgtgacacaggatcaggtggaccgggatatggaacagctttaccaggccatggcagaatattttcagcaggaaaatatgatggaaaaggtgagcattgggaagggaaacggctatgtgttcatctcctttaatgacaccgtgtttttccgtcccaatgaatatacccttctggacgagggcaaggaagttttggaccaggtcgcccgatccattgcggaagtgggcccttccatcaatgagatcagggtgctgggccatacggcgcaggcgacagccaatgaggaaaatgactatacagtggatcgattcctggcgtccaatcgggccacagtggtcactgtatatttgcaggagaaagagatcattgacccagcaaggctggtcagtgtgggatatggccagtggcggccgatttccagcaatgccattccggaagaacgggcaaagaaccgccgggtggagctgatcgtcaccggactggatctggatgctttggcaggcgatgatatcaagcagtattacagcatgcgggagagtaccggcacgccgagcccggcgtaccagccggaagagcagaacgcagcatcctgatccatactctgcctgggagggaaaacaatggcggaagttctatcacaaagccagatcgacgccctgctgaatgctgctcgcagcggcgagatggatttggcagcgtcggcagagaaaacgacagagaaaaagtaccgaaaatatgacttttacagcccgaggaaatttacaaaggaccgcatgaaaatgatcagcggcatctttgaaaattataccagggtaattaactccaggatcaatggactgctgcataccacctgcgaaatttctgtggagtcggtggaggagcagcgctattacgagttttccaacgcactgacagagggggatgtgctggtgctggcagatgtgcagtttgcgcacaaccagcaggcggaggaacagcccgttctgctccacttttccacctcgctgatgctgagtatgatggatcgcctgatgggtggagaaggcgatgtcgatcctgcgcttccggctggatataattttacggatctggagttgaagctctatgagagtattgtgaaggatctcatctccgtgctggggggaagctgggaaaactacatcgacctgtccttcggagtccggcgcatggaaaccaacccgacactggtccagctgatcggcctggatgagacagtagtcatcatcggtatcaacatccaattttccaactgttccggacagatgaacttctgcctgcccggttccatgctgtccgccatctttgcccggatcgccgcggccaatcaggcgggaagaggggccggggaggacaattcagaggagatccttgatattctcagggactccgagctggagatatctgcggagcttggccgcacagaactgaggctgcaggatatctattatctccatcccggtgatgtgatcgaccttggacacccaacagcgcagcccatttacctgtatattgggggaaagccttggttcagcggaaaaatggggacgttgagcagcaatatggcggtaaagataggggagacctatcacaatcagggaggaagggacaagtagggacatgaaacaaaatatattcagcccaatggagatcgatgccattggtgagatcatgaatatcagcttggggtcgtccgctacagcggtctccaatatgctggatcaccgtgtggatatcaccactccatctgtgtcggtggtgccgatcgaggaatttaccctgggagaactagagcctgcgatcgggatcgagatcaaatatgtctccggcctcgaggggagcaacatcatgcttctcaagcgccacgacgtcaagacgatcgtagagatcttgatgggaacggagatatcagatgaggagttcgagtttaatgatctgacgatcagtgcggtatgcgaggtcatgaaccagatgatgggcgcggcgtccaccgctctctctgacttcctaggccgctccgtcaatatctctacgccccagtccttcactctggatgacctggatcagtttgagcgggaacacttccagtatgacagcgggatggtggtagtggccaagttcatgctgagcattgagaatgtgctgaaaagtgaattcgtcaatgtcatgtctgtggacctggccagggagctgatcgccggatttggcgtagatctgagtgatggggagggcaagggagctaaatcggaagaagaggtaaagccggagccttccaccggcggagccaagctgagtcaggaggagatcgagcggctgatgagcgggggtgccccctctgcgccgccccccgcttcctccgggagcggaaagctgagccaggaggagatcgagcagctgatgagcggaggtgctccctccgcaccgccccccgcttcctccggcagcggaaagctgagtcaggaggagattgagcagctgatgagcggaatggctccctctgcagctcaggcggccccaccccggcagccggagccgcagcagagttcggcgcggccttatgaggcagcggggcagtacatgccggctcctccggcatacgctggggaaccgcgggtgatcaacacgaagccggtccagctgccgcccctggatgtggcggataagatcggccaggagcaggctcagaatctggaattgattatgtcagtgccgctggaagtgtcagtggagattggacggacgcgccgaaaggtggaagatatccttaccttttccaaggggtccctggtagttttagataaactggcgggggatcaggtggatctgtttgtaaacgggctgtgcgtggcccggggcgatgtggtggtcattgacgacaactttggaatcagaatcacagaagtattgaagcgtcctgagctgagtgagctgacacgggcagactaaccaatcaaatttagaagaaaaggatgatgtgacatggcaaaaattttggtcgtagacgatgcagcttttatgagaaaggtcattcgcgacaccctgacgaagaacggctataccgatgtccacgaggcggtcgacggaaaggacgcagtggaaaaatactttgagctccatcccaacctggtcctcatggacatcaccatgccgaatatggatgggctggaggcgctgaaggcgatccgggccaaggacagcagcgccaatgtggtgatgtgctccgccatgggccaggaggctatggtgatggaggcggtacaagcggggatcaaggactttatcgtcaagcctttcaaggacgaccgcctgatgaaaacggtcaattccattctgggcgcaccctgatcagaaaagcaaaatgcgggatgaaatactggagctggtttgggctctggccgcgatctgtgctgtactgctgctgtcctactggtttaccagatatgttgtggcggggcgggcggcagcagggcggctgaaagggcggcatgtaaccgtcttagaagagatccaggtggggaaggatcaaaagctgctgctggttcaggccggagagcagatctgtctgctgggtgcggcgccgggcgggatcacctgtctgaggacactgaaccgggaagagatggggcagtgggagcaggaaggagcaccggagggtgcctgccaacggataagctttcaggaggccctgaaaagtgtgcttcagcagagaaggaaataagggggtgggagcttggacgcgctgatcaatgtaaatggagagaattttcagacgctccagatcctacttctgactaccctgatcacactcctcccctctattgtggtgatgatgacctcctttacccggtatatcatctccctctcctttctgcgttctgccattgggctgcagcagaatccgcccaacatggtgctggtgggaatggcactgttcctcaccctgtttaccatgtccccggtgatcagtgacatccagacaaacgcttatgagccatacatagcagagaggatcactcaagaggagttttatgaaaaagctaaggtgcctctgaaggaattcatgctggatcagacggaggacagctctctggagctgttctgtgagctcgccggagcggatatgccggccacacgggcacaggcggaggggctgcctctgcggatcattgtcccatcctttatgaccagcgaactcaagcacgcatttctgatcggattttacctgtatattccctttgttctgatcgatgtggtggtggcgtccaccttgatgtctatgggaatgatcatgctgccgccctccatgatctccatgccatttaaattgctgctgtttatttcgctggatggctggcagctgctgttttctacactggtgcggagcttccaatgagtaaggaggagttatggacgtagtcgatatcctgcgggagggcgtgggagtagcgctgaagctgggggcaccgctgctgctgctgagtatgctggtggggatcctggtggctatttttcaggctgtgacccagatccatgagcagtccctctcctttatcctgaaaatgatcgtggtcgtccttatccttctggcggcgggcggctggatgctggagactctgaaggattttacacgctacctgtttaccctgatgtgaggaacagacagtatggttggatggtcagagctctttggatttgaaatggtgttggccaggatcagcggttttgtcctgttcagcccgatcctaggccgcagcaatatccccgggtacgcaaagacgggcctgattctggttttgtccgtgtttgtctacgggcttggacagccgatgccggcaccgccaggaacagtggtggaactggtggtccggctaggcgtggaacttattgtgggattcgtgctgggctttctgatgcagctgtgcgcagctatcgtccaggcaggcggagagatcatagacgctcagatgggactgacaatggcgcagatctacgatgcaagcagtcaggccaacatgtctgtgacggcatccctgctgaatatcctcttttttctgaacttctttgcagagaacggccactacaccctgatgcgcattctgctgggctcggctgagatcctgccctttggcaccgctgtcctcggggaagcagcggcctcctacgtggcagaggtgtttttctcttccatgcttctggcggtaaagatggccctgccgatcttggctgccgaactgctgggagagctgggaatgggaattttgatgaaggctatcccacagatcaacgcctttgtcatcaacatggaactcaaggtcatcatcggactgatcctgctcttcctgttcctgactccccttagtgaattcctgctgggggcagaggcggacatgctttctggcctgagacgggggctggccgtgatggcaggctccggttagtgggaagggctctggaagagagaagaggtgatggggcttggcagacggacagaaaacggaaaaagccacaccaaaaaagcggcgtgatgagcggaaaaaaggaaatatatttttcagtaatgacgcagtctcagtggtcgtattgctggtcagcttccttgtcctcaggctgagcgccaactggatcgcggcacaaatatatgagttcctgcggtactgtatggatctcattgcgcagccatctatggaagtcccggcggagggaagcgggctgttcattcatcttctgggaacgtttgtcaaggctgcggtcccactgatggctgcggctgcagcagcaggggtggtggccactttttttcagacaaagctgctggtttcaggggagtccctgaggccgaagctgagccggatcagccctctgcagggagtgaaacggctgttttccctgcgcagtgttgtggaggcgctgaaaggactgctgaagatcgcagttcttctgatactgattttccggtatatcaccaacgtgctggacctgtttaccaaatatctttacaccgatcttttggcggcctgtgcccatctgtttgaggagagcttcctgctgtccatgcagatcggggcggccttcgcggtgctggctgcggcagatatcttttatcagtggtgggactatgagcggcagatccggatgtccaaacaggagatcaaggaggagttcaagcagacagagggagatccgaaaatcaagggaaagatcaaggagacccagcggaaaatggctcagtccagaatgatgcagcaggtgccaaaggcggacgtggtgatccggaaccccacccatttcgcggtggctctgcgctaccagccggatcgggacccggcgcccatcgtgctggcgaaggggcaggacgaactggcggccaggatcgtgcgtaccgcagaggagcacaaggtggccgtggtggagaacgtgccgctggcccgggcgctgtatgcctccacagacctcaaccaagtgatcccgcctgagctgtataacgcagtggcggaggtattggtttatctgtatcggatggatcagaagattccatgagaaagtaggctccaggaagagatatgagacgaatactcaacaatgcaatatccctgatcgtggtggtcatcgttctgttcctggtgatcccgctgcatcccagtgtgctggatgtgctgctgatccttaatatctcgctgtccatcatgatcctgatgatcaccatgaatatttccgagccgctggaattttccatttttccctccctgctgctcattacgactctattccggctgggattaaatgtgtcctccacccgtctgatcctcaagaacgggggaaacgccggtgtggtcattaaggcgttcggggatctgatcacccagggaaatatcgtcatcgggatactgatctttttgatcattgtactggtccagttcattgtcatcaccaagggggcggaacgggtctccgaggtagctgcccggttcaccctggacgctatgccgggaaaacagatggctattgacgcggatctgagctctggcctgatcaatgagaaagaggcccgtctgcgcaggcagaagatccagcgggaggcggacttttatggcgccatggatggcgccaccaagatcgtcaagggggacgccgtaatgtccctgatcatcacggtcatcaacttcgtagccgggctgatcattggaatcgtacagggcgggggagacctgagcacggtcctaagtgtatattccatcgctaccattggcgacggcctggtgtctcagcttccggctctgatgatctccactgccactggaatgatcgtgactcgctccgtatcggacgggagcctgaacaccgatgtgatcagccagttcaaggcccagcccagagctattatggcgaccggcatgatccttctgatgctggggctttttccagggactccgaccctgccccttctgttggtgggagccgtcctttccgtaggcggatactggagcgatcacaaaatggcccttgccagacagatggaggaagcggagagcgcaagggccggtgaggcggtgccagagctccaggcggccagcgaggcggactactacaaggacatcaacaatgtctactccctgttgactgtggagcccattgagatggaattcggatacagcctgatccctctggtggacgaagccagcggcggaaagctgatcagccggatcgtcattttccggcggcagtatgctcaggacatgggatttgtgatcccgtccatccggctccatgacggcgcatccctgggaaccaaccaatacatcatcaagatccggggagaggaagtggcacggggagagatcctggtggactactatctggccctggagccctccaatcccacaggagagatcgacgggatcgagacagtggagcctgcctacggtattccctcacgctggattctgccagaaaacaaggagatggcggaaatctacggctatactgtgatcacaccgctgacggtgatgctgacccacctgtctgagaccatcaaaaagcatacttacgagctgttgaatcgttcggagaccatacagctggtcgagcacttgaaacagacagagccagagctggtggcggacgccattcctaatgtggtttcttatgcaaatctggagaagatcctgaaaagcctgctccgggagggcatcccgatcaaagatctcgcaactatcctggaggcagtggtggaggccagcggcgggacccgtgacattgatatgatcacggaacaggtgcgcagtgcgctgagccggacgattacccggcgcttctgtgaaaatggacagctgagggtggtgacgttggacgctgaggtggaaaagaaagtgctggctgccctgacgaaaaacgatcacggggtgtatctggccctgagcccggatatcatgcagcagatcattgcgcagctgggagagttgagaaagaagttcaacgacctgtcccagacacccatcgtcctgaccagccagattatccgggtctacctcagccgaatgatcgcccagttttatcctgatgtctatgtgctctccttccacgagataaccagcagcgtgcagatccaggcgatcggcaacattacacttcagcagcagaatcagccttcataggtaaggggcgacacggatggaaaagtgcagagaaaaagttgagactgccgcccagcagactgaattgctttcagaggaagcagtggagcagatgagcaaccaagagctgctgtttctgtacagggaaagcggagatgaggaactgaaatggaagctggtactccgcatgacaggcatggtgcgggccattgccgcccaggtgtgggggatctacagcagctttgcccagctggatgatattgtggaagaggggatcctggtgctgctcagcgcggtagacaagttcgacccctcaaaggacgtgaaattcgagacctatgtctccaagcgcctgcggggcatgatcgtagacctggccagacaccaggactggctgccgcgtcaagtgcggcagaagtctatccgtctgaaccgggccagagaggaactgtccatgcagatggggcgcacgcccagcagcgcggaaatggcggaccatctgggcgtgacaagagaggaatatggggctatgctctctgagacagcggtgtccggcctgctttcctttgaggcgctgctggatacccagggcaggggagcacggcagaggatctcgggggaaagcgggaacccgcccgaagagctgtgcgaggagcaggagctgcatgagacgctcaagcaggggatctcatccctgcgggagaaggagcagctggtcctttccctgtattatgagaaggagctgagcatgaaggaaattgcacaggtgctgaatgtgagcgcccccaggatatcacagatccacagccgggcaatcgagcatctgaggcagtacatgaagcaatacatggaagcgcagtaagtggaaaggcggagcggtaacatgacaaaaggcttttacaatttgacctccggcatgctctcccaaagccggaggctggatgtggtctccaataacatgacaaatttgaccaccccaggctataaggcggaacagtacacggacagcacctttcaggaagtgctgatcagccgcataggcaacaagaacaaaagcggtgcacaggaaattggagaagagagctatatcctggcacccagtcagctttacataaactttgcccaggggactccggaggagacggggctcaatctggattttgcgatccagggagagggtttttttgccattcagacggagaacggcacagaatatacccggggagggagctttgcgctggatcaggagggctatctctcccttccggcccatggcagggtgctgggaccggacggacagcctctccaactgacaacggatgatatccgggccgatgagttcggccggatctataccgaagatggagatgcatacctgggacagatcggcgtattcgcctttgcggataatggacagctgactaagaatgagagcgggctgttcggggccggcggtcaggcagctgagccagtacagccgtccattcagtggcggtgggtcgagagctccaacgtggatatgatccgggagatgagtaccatgatgactgcggagcgggcgctacagagcgcggcccaagtactcaaactctacgacggcctgctgacgaaggcggccaatgagctggcgcggatgtaaacggagagggggagagcttatgattcaggcattttacagcgctgcggtgggcgcacagcagcagatgcagaagatgaacgtgcaggcaaacaatatcgccaatgtcaatacctgcgggttcaaggcagaaaagccagcctttcaggcgctgatgtacggcatggtcaatgggatcggaggggatcagcttccgaaggggagcgggacgcgcatggtatccaccgagacagacttcagtcaggcacctgttgaggagactggaaggaaacaggactacgccattgcgggagacggcttttttgccctcttcgacccatccaaaaacgagatatcgttcacccgggacggctcctttgcggctgcaggctttcaggagcaggatgaggagggagaatggcacgaagtctactatctgacggacggtgcggggcgccaggtcctgaactccagcggctacccgatccagatggaaaattttgaggaagagcagcctgtgggcgtgtttatcgtgcaataccaggatggactgcagcacctggacggagggcgcttcctggcaacggaaaaaagcggaaatgtttggatgggcagttcagcagtccggcagggatttttagagacatccaacacggatctggccactgagatcggaaaggtgatcgaggcacagcgctcctacagctatgcgctgaaaatgatgatcacggcggatgaggtggagacgactgtgaacaacctggcgaatggataagacgggggaattgtcttgaaaaattttgatgagctgaatgttttggaactggacaccatccgggagatcgggagcatcggcacgggaaacgcagctaccgcactgtccagcatgctggggtgcgaggtgcgtatcgacgtgccggaggtccgaatcatgggctacaacgaggccattgactggatcggcggccctgaggtaattacggccggcgttgtagtgcgcatgggaggcgaagtgaatggaatcatgctctcggtgcagcagatagagtttgtcaatctggtgttggggcatatggtaggcagggagatcgaagattacagtcagctcacagagctggaccgttccgccttggtggaagtaggcaacatcatgatctccacgttcatcaacgctctgtccggtttagcggacctcaccatccaggtaacggtgcccgccttcgcggtggacatgcagggggcgattttgaccgttcccatggcggaatttggcggtcagtcagattacattatgacgatcggcgcaaattttatctgcaatcgcaggatcgtaccctgccgcctgctgctctcaccggatatccgctctctaaattttttgttgaagaagctgggtgttttggatgagtgataagttggtggtggggatcgcggatatgaaaatggcccagtatgaagggatgctggtgacatatgcccttgggtcgtgcatcgggatctgtctctatgaccccggcctgagactggcggcgctggtccatgtgatgctgccgctgaacatggagaccgggcggagatcaccgatgaagtatgcggacacgggaattcgggagaccctgcggcagatggaggcgagaggggcaaggcgcagccgcatggtggccaaaattgcgggaggcgcccgtatgtttgaggtggcgggcggcggaagcctgggaaatatcgggcagcggaatattgaaagcgtgcatatgacgttgaaaagggaaggcatcaagctcctgcgggaggatgtgggcggtacagtggcaaggacgctgctgttcgacgcagaatccggagaggcatgcatccgcagctatggaagaccggaactgattttctagctaaaattttaaatgagatcagaaatgggggatcagcatggcagagcgaggcaaccacgagatattactggaaacagggacaaatgagatcgaaattatggagtttaccattgacgggaatctctatgggatcaatgtggcaaaggtgcgggagatcctgatgtccgcacctgtacatcccatgccccattctcatcccgcagtggagggcatcttcaagcccagagacatagtgatcacagtggtggacttgcccaaatatctgagtggacgggaggaagaaaaggggaacaaggacctgttcatcatcaccaatttcaatcagatgcatattgcgtttcgtgttcatacagtggttgggatcagcaggatctcctggcaggatatacagaagccggataagaccgtctctgggggaccagagggtgtggccaccggtatcgcgcagtgcggtgaggaactggtcactattttggactttgaaaagatcgtggcggagatcgcgcctgagacagggatccagctctctgaggtggaccggctggggccgagaagccggaacgagactcctatctgggtggctgaggactctatcctgctcacacagatgatccgcagcgctttggtgaaggccggatatgtaaacctaaatatgtatccaaacggcggtgaactatgggacgccctccagcagtggaagggagcgccggatctgcgagaacatgtggcgctgatcatcacggacttggagatgccgcagatggatggacaccgcctgacaaagctgatcaaatgcgatccggagttcagccgtatcccggtggtgatcttctcctccctgatcacggaggagatgcgccggaagggaaaagaggtgggcgcggatgaacagctgagcaagcctgaaattgggcatctgatcgggatcatcgatcagctgatcgcccgtggagagtgacggaagcaggagggaagtctatgaacagcaaatatatcgtccgccagccgatcaaggatgcagaaaaccggatcatcggctatgagatccagtactatggtgagaatcaggcattcagcgggggagatggtcctggcgccagcgatttcgccgcagcagacaccatctacaattttctgacgctgaacacagacaagctgcttcgggggtccctgaattttatgacctttaccactactctgctgatgaaaaagacacccaggctgtttgacaagtcggaactggtcattcaaatcgatgacagtgtgatcattcatcctctggctatgcggatggtacagcagtacgcgaaggaagggtaccagatcgcggtcaatgagtttcaatttgcgccgcggtatctggggattctggatggcatcgactacatcaagctgaattttcagagcacaccagagctcacactgaaaaatatcattgaaattgcccgcagcatgaagaaaaagtgcattgcggtgggaatagaccgggaggagctctaccagaaggcgctgaaactgaaggtggatgcgctggagggcacttatgtggcggagaagctccggacaaagacacacagcagcggctacctgcaaagcaatttcttccgcctgatggtggcggtgaccagggatgagcctgatgtggaggagatcgagcagatcatttcggtggatgctactttgacctatggcctgctgaagatggcaaattcctgctattttgccctgagacacaaggtggctactgtgcgtcaggccatcatgaccatgggactgagcgaactgaagcagtgggtctatctgctgagcgcaagcaatgcagaaaaccagatggaagagggagcagaggaattcctgcgcttgtcctttatgagagcaagcttctgcagcaacctgatgaactatgcgaaagacatgcccatttccaagccagaggcatatctgatgggaatgttttctactctgaactatctgatcgacgcaccgctggaagagatcctggagcagatccccctgtgcgcagaggcgaaggaggggcttttgcatcacacagggcggtgcggtatgctctatgatctggcactgtcctacgagcgagccaactgggcaagaattgacgaactcgcggaggggctgggtatcccgaccaacctgctgaccagcctttatttcagctgtatggaggaagtaaaccgggtgtggaacgaaatcacacgtccggagcccagccagctggaggcgggcctggcggaggagcgcgggacctgacaggaccgggacggctgacagagaacagggggggcagccgtcccggttttttgctgcagtggaaagtcgagtatgagggtgaagagacatgataccagtttgggagcactttgaggacctggaagagatcctctatgtggcggatgtggagacctatgagctggtgtacctgaaccggtacggccgctccgtatttagaatcgaggatgaggacaactacgcagggaaaaagtgttatgaggttttgcagggaaggagagagccatgtccattctgtacaaattcacagctgaaggaaggcaaattcattgaatggacctatcgaaatcctctgctcaaagccccctatcggatcaaggacaccatcgttgagtacgagggcagacagtaccgcatggaatttgccatggatgtggagaaggaaaagcgggaagcgcagaagctggatcttgccgcggtgcgtcattatgaagagctgatcaatgagtgctttctgaaggtgcgtgccgtcacagacatggatgaggcattaagcttcatgctccattatctcgggacccatatttcctgcaatgcagtgatgatctacgagagcagggagcgaaaatggctgctcaacacctatagctggagcaggacggagaaggcgccggagaaaaaactgctggagctgagtgtggcggaacccgtgacaaagtggtatgaaacattttttcataacgagccgctgctgctgacagatatggaaaagctgtgccgggatatgccggcgctgtctaaggtgctgtctccggagcaggtccggcgtatgatcctgatcccgcttctggccaaagcggaggtagtcggctttgtacgcatagacgacccaccagagaaacagatgagcgcagtggcggagatgtgcaagatcctgtctcattttattgtctctctcatacagcagagggacctgatccggaatctggagcagatcagctttcgtgatcagatgactggcgcgatgaatcggtacgcgctcaattcctacttagccagagcacatctggagcgggacatggggctgatctactgtgatctgatcggcctgaagcgggtcaatgaccggtttgggcatgccagcggggaccgaacgatcatacaagcctatcaggtcttaggagggatgtttcctgaggaccagatcttccgcatgggcggggacgagtttctggtggtgcgggaaggggtaggcagggagaagtttcaggagagtgtggagcagctgaaagcggcggcggtatccagccgctgctggctgtccatcggaagcgcttggtgtcaggccggcggaaaaagcttcaatgacctgatgaatgaggcggacgaaaatatgtacgagaataaacggacatattaccgcctgtgcggcctgacagatggactggaagagcaccggatggagcatgatgacagggagcttgtgcagagtcaggatgcgctccatgcctttgtgagggactgctattttgatgtgacctcctttttgaaatcgctgaccatgacgggctcttccttctatatctatttcggagatatgaggaaaaatctatattatatttccgacaatttaaaggaggacttctgcttcccggggaatattgttcccaattttgtgtcgctgctggagcagcgcatctatgggccggaccagcagatgcatgtcgaggatacgagggccatgctcagggaaaagcgggagagtcacagcgtccgctatcgaatctatgacaaaaatggagagctgacctggctgcactgccgggggatcatgaagtggaatgaggataagacagagccgctgtttttctccgggagcatggtcagcctgaaaaatgagtcggaggtggatccgatcaccggactgctcaacctttcccttgccctgaagcggatctcggagttcaacaggcttgggatcgagacaatgctgatgtgcatcgtgctccgaaaattttccgatgttaaccacgtctttggccgggacattggagacgcggtgatgaaagagatcggctggcagctggagcggaatctgggcgtgcagttctatttttatcggatagacggagcgcgttttttggcagtctctcaaacggtgctggagccggaaggggcggtggcatcgatccaaaagatcataaaagacatattcagaaaatataagatccatgttgtttccccctgtgccattggggtgctccacagcgcagcgggacagagagaggcccaggagctggtcgacaatgtgatcacggcagcccatacagcaaaagcgttcccagatttggattatcttgaattttcgtcccatatgacaaagacctatcaggagcataccgacatgagcatggctctgaatgcatgcattgaacatgggttccaaggcttccgcattgtgatccagccccaggtagagacaaaaaacggacggatgttcggcggtgaggtgctgctgcgctggaagaacgaggggaaagagatatcaccttccaaatttgtcccgatactggagcagacgggaatgattgctccggtagggaaatggattctggaggagaccatgcggaaagggaaggagatcctgaagtatcagccggatttccggctctcggtcaatgtcagctatctccagatcatggatcaaaagtttttcccttttttagaagataccatggagcgcttccagataccggcggaaaatctgctgatcgagctgacagagacccattttgacgagatgccggagcatcttcagcgctttatccggcagtgcaagcagatcgggatacggtttgctctggacgattttggaagtgcctactccgggctgcagcttcttctgcagtatccggctgacctgatcaagctggaccggactctgatgcgggagatcactacctccaaggaaaagatgaggtttatcatgagcgtggtctacgcctgccatcagttcggaaaggaagtctgtgtagagggcgtagagacaaaagaggagctggatatcgtccgccagacagagtgcgactttatccagggattttatttctacaagcctctggagtgggaagaaatgcgtcaggttttggagtcgcagaaaaaagaagatattctgagttggaaataggaaaatggaaggtgagaggctatgagccccaaatatgaagaggacctctccagtgctttgggcgcgatatgcgaggtgctgacccgggaaaatcatcttctctttgtggggaggatacaggaatacgacagggcaggcggccggctctgtgcagagctgcgtaaaggggagggaactcccgggggtgttttataccatgaaccggtaaaggtacacatctatatgggacaggagcagggcaaggtgatgatcgcctatggacaggtggagcggaacgcagcggaccactggtggatcgaactggagaacgttgtatctgggccggagaggcgagagaacttccgacagatggtgagaggccgcggcattttgactgaccgggaggggagaaagcagccctgcaatttggtcgatataagcatcagcggggtgaaattttacagtcagggccggtatatagagggggaagtgctggagctgtctggatttcggttgaggcaggagggggagctctataccctgctttgcctggtgcggagggtggagcggatagatgccggaaagggctggtattcttatgggtgcagcttttatgacctgcgtccggggcaggaggaccagctgtgcagggatatcttcaacctgcaggcaaggtctatcaaccggaagagctgagagcgcctgaggccccccgccaatatggcggggggcctcagtttg

SEQ ID NO: 13541 - DNA, 558 bp, Unknown
  gut microbiota DNA sequence
taatcggtgtgcaggacaagcccgctttgggtaaaggcaaaattcacctgcagcaccacaaaggggtcatcaatggtggccagcagttggccactgccggtatcccacacctctatgggagagttgccacgatcctgctgaacagccatcaagctgccccttgtccgtaccatgcaggtatctgaaaaattcagcccctgccggacagaaaacgggaacggattggccatctcctctccggtctgggtcagatagaacttgccgcccaccgagaagcactggtcatccggcgagaagaagggatgccagccctcattggggatcactactttttgggcggacttcagatcgaccagcacatactcaccctcggtgacgcggtaagccgctttgctctgccggggagagagcatcccgaggcagtaacaggcaaaattcggattcttagacttcttgcatttcacgccttcccgccacacttctgtgttgctgccaaagtcaaagacgacgatctcctcgcctgtgtaccacagggccaggtccccgccggcatccagc

SEQ ID NO: 13542 - DNA, 1273 bp, Unknown
  gut microbiota DNA sequence
ctcccggaagatccggtcacggtcctcctggcagtcccacatctggctcatcagaaaggcatcaaagcctttgcccttgaacttgtcgcatttcatcaccatcagctgtaccgggcacttgccgtcctgaaattccgcgacatgatccagggcggcaaagccggccattttcttatcataacagaagcactctgttgatccgatgtgcttctccattatggcagtcattttttctttatccggcatttctaccggctctttgaacagcatctgaatgagatagggacctccgggctgggggccttttttgtcgtccagattttgctggaaagctttattgctcatttggtttcctccttcttttctgggaacagtttccaccgaaactccagctctttctggacaaactctttcggcaggccgcgggggttggcgatgagataccatacccgaaaggtgcgcttcttcggatctgtttcctgccggtagagctgatagcccgcctcatcctcctgtgtccactgtcctgtctgccgcttggcctgcacaaagggttccaccacctggtccagttcctctttggtgcggcttgaggcccaggcttgatccacatcattggcgtgggagaggtggaacaacatcgaacccatccagttttttgccttgtgtccaggcgttccgcgcaattccgcctgacggcggtactcctccatctgctccgccgttccgtaccgttccaccatctgctcccgcacatagatgaaccagctgtagtcctccgcctcggtgaagggggcgcagaccggctgtaatgcctccacggggtctgcctcgaagcggtcgatgaagtcgaggtagttggctttgaccaggggcagaaaggtgtccagcagcccggtgttcagccgcaggtcctctgtcagcatccgaaagaatgaaccgcctgttgtgggttcaattctgaaagagtagaggtagtcatctccctgctttatgatacagctgaagcccacctccacattcccatggccgatttcgtagtctatgtagttgtagcggctccggtcaaaccagatctgataggtcagcccgtttttcattttctttttgaagtcgccctttttcagacgcttccagcccttttcctccaggcccaggccgttccacaggtagtccagaagttcctgaattatatctgccggccgtttttgttccacggtctccaccccctgacgaattctctttaatagtcaagcaggataggcacctgctg

SEQ ID NO: 13543 - DNA, 19540 bp, Unknown
  gut microbiota DNA sequence
atagattataacaaaagggttcttgagcatatgctcaagaacccttttgtcatacatgaaaggtcagcggcaccgctgtcgctggcttgcgcccggttagttggaagcggtatccaggtccttgtcgccgccccagatcatattcttgcgcagctcctcgcccacgatctccatctggtgcttggccagctgggcgcgcttggagttgaagaaggtgcggccgtttttgttctcggcgatccactttccggcgaaggtgccgtcctggatgtcctgaaggacagccttcatgttcttcttggtttcctcgtagggcagcacgcggggtccggagacatactcgccgtactcggcggtgtcagagatggagtaattcatggccgccacgccgcccttgttgatcaggtcgatgatgagcttcatctcgtggatgcactcgaagtaggcgttctcaggctcgtagccagcctccaccagggtctcgaagccgcagcgcatcaggtccaccacgccgccgcacagcacggcctgctcgccgaacaggtcagtctcggtctcgtcgtggaaggtggtctccatcacgccggcccgggcaccgccgatgccggcgatgtaggccagagcgatcttataggcgtcgccggtggcgttctgctccacggccaccaggcagggcactcccttgccgttgacataggtggagcggacggtatgaccggggcccttgggggcagccatgaacacgtccacgcccttggggggacggatctgctggtagcggatgttgaagccgtgggcgaaggccagggcattgccctccaccaggttgggctcgatgtcccgcttgtagacgtcggcctgtacctcgtcgttgatgagcatcatcacgatgtcgccccacttggcggcgtcggccacggtcatcaccttcaggccggcgtcctcggcgttcttccagttcttggagccggcgcgcaggcccacgcacacgtcacagccggagtccttcaggttcagggcatgggcgtggccctgggagccatagccgatgatggcgatcttcttgccgttgaggtagttgatgtcgcagtctttctcatagtacatttttgccatagttatattcctccttgatcttattgtcgtcgtatatggtgctacgccctctttcgatggcgatggtacccgttcttgcgatctccagcacgccgaagtccctcagcaggcggaccagagcctcagtcttgtcccggtccccgaagatggctacggtaagagtctcccggctgacgtcaatgatgttggcccggaagatgttggccatctggatgacctcgtcccgggcgttgcggtccagagtcttgactttgatgagggccatctcccgctggagggaggtggactcgtccaggatcttcactgcgatcaccggaaggagcttgcggcactgggcggcgatttgggagatcatcagctcgtcccccagcagcacgatggtgatgcgggtcacgccggggtcccccgactcgccggagacgatggattcgatgttgtagcccttgcgggagaagaggcgggccacctggctgaggacgccggggatgtcctggaccagaatggacagcgtgtagggcttgatgtccttgttcatatcaggtctcatggtgaagccccctttatttcagcagaaagtcggtgatatgggccccgccggccaccatgggccggaccatctcgtccatatccaggcggcagtcgatgacacagccgcaccccgcctggagggcctggccaaaggcctgctccatctccgcccgggtggagacccggaagcccttcagtccatatgcctcggccagcttgacgaagtcggggccacggtccagggtagtctgggagaagcgctggtggtagagcaggttctgccactggcgcaccatgcccagacagccgttgttgaagatgacggtgatgatgggcaggtggtagtgctccacagtggccagctcgtggcagttcatgcggaagcagccgtctccagtggtgtggaccaccaccttgtccggattgcccaccttggcaccgatggcggcccccagtccgaagcccatggtgccgaagccgccgctggtgagcagctggccggggtagtcgaagtggaaatgctggatagaccacatctgatgctggcccacatcggtggccacgatggtgtcctggggggccatgcggcggatggtctccagcacctgcctgggagtaaggacctgggaggtctccacctccggctcccgcttcagggaaaggatctgctccttccaggcgtcccggtggtactgggggacccgctggttgagcagttccagcacccgtttggcggagccgatgatgtggtggtcggtgaggatgttcttgtcgatctccgaacggtcgatatcgatctggacgatcttcgcctggctggcaaaggaggcagggtccagagccacccggtcagagaagcggcagcccacggcgatgagcaggtcgcactggtcacaggcggtgttggaggcctgggtgccgtgcatccccaccatgccggtggtgagggggtgcgcaccggggaagccgccgccccccatgacggtgatggccacggggcagtccagcttctcggcaaactcccggaactgccggtccgcccgcccgcggaccacgccgccgccgcacatgagcagcggccgctgggactgggcgatcatctccaccagcttgtcgatatcccccaggtcaggctccggcggcttgaggccgtggcgcaggttcagctcccggatgctgccgcaggagcggttctccttccaggggatgaactcatagtcgatcatagtggtggggaaggtgacgttcttcagaaagtcgatgagcaccgggccgggccggccagtggcagccacggcaaaggcctgacgcatcacgtcggggatggtctgggggtcccggaccagataggtggccttggtgatgggcatggcgatgccggtgatgtccacctcctggaaagcgtccttgcccagggtctcctcagtgacattgcaggtgatgaagaccacaggagaggaatccatataggcggtggcgatgccggtggtgagattggtggccccggggcccgaggtagcgaagcacacccccaccttgccggtggatcgggcatagccatcggcggcgtgggaggccccctgctcgtgggcggtcaatatgtggtgtattttatcttggtagtgatacagttcatcatagagattcaggatggtcccgcccggatagccgaagacggtgtccacctcctgctccagcaggcactccaggatggcctgggtggctcttactttcaagctgctgcctcctttggttcagataggaacgatgagataggagctgaggcgcccggcttcgccggaccgctttatatttgtgcgccggaagcgcacttactgactcagaacttttatctcctgactcacgatcaaattttccctccgcccttctggacggcgatgaccccggtgcgggccacctccaggattgagaaggggcgcatcatggactgaaaggtgtccagccggtcgggggtatcggacagctccagggtgagggaggtgggagagatatcgtccaccttggcccccatgatctcacagatggtcatgatatcctggcgggtcttgttgttggcgttcaccttcaggatcatcagctcccggccgatcaggctgttctcctccagggtgcggaccttgatgacttcgatcagcttgttgagctgcttttccacctgctccaccacgctgttgccgctgtccacgatgatggtgatgcgggagatggtggggtcatcggtgacacccactgccagggattctatgttaaaggcccggcgggagaacaggccggtgatccggttcagaacgccggcctggttctccaccaggacggaaatggtctgtttcatggcttatccccctctcagtcattggtcccaacgtcggggtggacctcacaaatcagcagacagctgccctgtgtgcccagaaaacggtccagcgcctcgtccaggtgatcctcgtcccccacctggatgcaggggacccggtacgcggcggcaatggtctcaaagtccggggagccgtccagcgccacaccgaagggcccgtggtagggggcgctgctctggatctggtggaccagacccagggtgtggttgcggaacaggacgatcttgatgtccatgtccgccgcccggatggcggccagctcgttcatggccatctggaaggagccgtcgccgcagaccaccagagtctggcggtcgggaccggccaccttggcccccacagcggcagggagggcataccccatggtgcccaggccgccgctggtgagcaggcgtccgtgcttctgggggatatatttgcaggcgaagatctggttctggcccacatccacgcagatgacggcatcgtcgtccagccgggctcccagccggcggaggactgtgcccgggaagaccgagcccgcccggcgggggaagacgcggttcagctccgccttccggtagtcacgcagcttttccagccaggccgccgagtcggtggccgccacgtcccggtccaggatctgccggaggatgaccttcacattgcccaccagagggatggcggcctgcatattttttccgatctccgccgggtccacgtcgatgtggatggtggccatgcggcgctggatctcccccgggtccaccatggcccggtcggcggcccgggtgcccaccatgatgagcaggtccgccttggccagggccttgttggcgcagtggttgccgtgggccccgatcatccccatgttcagcgggtggtcggtgggcaggagccccagccccatcatggtcttgaccacagggatggagcaccgctccgccagctccagcagctcctctttggcgtcggccagccacacgccgccgccggcgcagatcagaggctgtttggagcgggagatggcctccaccacccgcttgatctgcaggtcattgccctttacgctgggcttatagccccggatgctgacctcctcggggtagtagaactttttcagggactgctcctgtacatcgatagggatgtcgatgagcaccgggccgggccggccagtggaggcgatgtgaaaggcctccttgacgatgcgggggatgtcgttggcgtccttgaccaggtagctgtgcttggagaagggggccaccgcgccagtgatatccacctcctggaagatatcccgccccagcagattgctgggtacctggccggtgatggctaccatggggatggaatccatataggcggtggcgatgccggtgatcaggttggtggcgcccgggccggaggtcaccatgcacacccccaccttcccgctgacccgggcatagccggaggccatatggcccgcgttctgctccgtgcggaccagggtgtagccgatctccgggtgggacttcaaggcgtccaccgccgggcagatggtggcgccggcatagccgaagatatgcgctacctgttcccgcttcaaactctcgatcagggcctgtgctcctgtcatgagaagatcacctccaaattgcatgccgcctgggcggcgggataaaaataaacggcttcgtcctatctcgataggacgaagccgtctgctccgtggtaccacctaacttcacagcggagcggccagaacaggccggcgctgcgcgctcatgcccctgtaacggtgggtctccggccccgcctactgcggcaaacggttcagcgggactgctcgcgggtgatgttcggcgccctgttccacaggtggagcttacaccaaccgctccctctctgtaccctttggaactgcctactggcccggtcatcgcgttttgtcatcttccgggtcgccccggtaaaagttatttactactttatcgcacggggagctgtttgtcaattccctttttttctccggaacatttttctgctgggctcagccctcgatctccatcatcagctctacccgcttggtgtggcggccgccgtcgaattcggtggacagaaacacgtccaccatccgctccgctaggttggggcccacgatacccgcccccatagccagcatgttggcattgttgtggcggcggcacatctcggcggacagggtatccccgcacagggcgcagcggatgccctttaccttgttggcagagatggagatgccgatgccagtggtgcagatgacgatccccttctcacactggccggaggccacggcctgggcggcagccttgccgaaaacagggtaatcgcaccggtccggcgtctcacagccgaagtcctggcaggtgatccccttagcggcgagataggccttgatgtgctccttcagggcgtaccctccgtggtcggaagcgattgcgatcataatgaaatcctccttcttctctcttcttcaactatccttctgtcacagccggatgaattggggggtccggcggtggtagacggtgaaataacggaagccgactgtccggagcagctcctgggcctgggcgatccccttccccacgtcctctggcctgtgggcgtcggaccccagggtgatcagctcgccgccgcagtcccggtagagctccagcaggggctgccactgggtcacagtgcgcccgcaccaggtgttcacctcaatggcccgccccgcctgggccaccccggtgaggagcgcgcgcaggcggtcctggtacctctccagagtgacaggatgcccagggatcttctgcatataccgaagggggtagatgatatggcccatcgtgtcccagcagtctagatggaccagctgggccaggctgtcgaagtagtcatccagggcctcatagcaggcccggggggtggtgtagtccaggaaatagaagtccttcccccccttggcggggctgaggttgtggatggagccgataacaaagtccaggtccgcgccggagaggatggcggcggcgcagtccgggtccaccggggcaccgcccagctccaaacccaggcgcagcttcacgccggcggggcagtccctccgagccgcctgatactgggtcaggatgggggcccagtccagccctgcgacccgtcccccgtccagatccagcaggtcgcagtggtcagtggcacacaggtcggagaggccggcggcctgggccgcccggagcatctccgagaggggcgcctcactgtccggggagcagcaggaatggatgtgatgatcagcaagatacatacagagacctccggcgggcaaattctgtggatcagtccgcttcgccctctattttattgcatttgttgacattttgcaagtgattttcttggaaatcccttcctaccatttccggaagaggaacggcgttccagccagcgctaagccggacggaaaaagccgccgcagacccgtctgcggcggctttgaaagggtcagtcgaaccgggtggggacatgccagatgtcccgggcgtagtcccggatggagcggtcggcggcgaagatgccggaccgggcgatgttgatgagagatttctgatcccaggctctccggtccttgtagacctccagagagcggcggtgggcctgacagtagctgtcaaagtcggccagtagcatatattcatcggcgatcccgccccctccgccgaagagcaggcggttggtcaggtcggtgtaggccctgccgtcggagaagccggcggagatctggtccagcacccgcttgagcaccgggtcctgctggtagtaatccagagagcgatagccctggcggcggcgctcctccacctggtcggcggtgaggccgaaaaggaagatgttctcatcccccagctgctggtgcatctccacattggctccgtccagggtgccgatggtgagggcgccattcatcatgaacttcatgttgccggtgccgctggcctccttgccggcggtggagatctgctcggagagctcggaggcaggcatcagcttctctgccagggagacccggtagttctccaggaaaaccacctggagcttatccttgcagacggggtcggcgttgatctgggcggccagggagttgatgagctggatgatctgtttggccacgtggtagcccggggccgccttggcgccgaagaggaaggtctggggcgtgaagtccatattgggatcgtcccgcagctgctggtacaggcacacgatatgcagcacgttgagcagctggcgcttatactcatggaggcgcttcacctgtacgtcgaagatggcgtcggtgttgaggatgatcccggactcccgggccacatagccggcaaaacggcgcttgttctcctgtttgatggactccaggcggtccaggacggcggagtcgtccttgtacttctccaggccggagatggattccgggtggagcaggtaggcgtcgctgccggtgcactcccggatcagggcgtccagcttggggttgatctgagagagccagcggcggtggtcgatgccgttggtcacgtttttaaactggtcaggctggcggaggtaggcgtcatggaacacgtcccgcttgaggatatcggagtggagggcggacacgccgttgactgcggaacaggcgcacacgcacaggttggccatgcggacctccccaccccagatgatggccatccgggagacccggttcatgtccccgccgaagtatccctccagctggcgctggtagcgggcggcgatctccttcaggatctcccagatgcggggcagcagggactcgatcaggttctggggccagcgctccagggcctcggccaggacggtgtggttagtgtagcagacggtgttggtgacgatgtgccacgcctcgtcccagctgtacccctccacgtccagcaggatgcgcatcagctcggggatgaccagggtgggatgggtgtcgttgatctggatgacatgcttctggtggaagttgcgcagcgtcccatactgggcacggtgctggcggacgatagactgggcggtggcggagacgaagaaatactgctgcttcagccgcagggacttgccctcgtagtggttgtcatcgggatagagcacttttgcgatgacctcggccatggcctgctgctccaccgccttcaggtactcaccccgggagtagagggacatatctacggggaccgggctcttggcgtcccacaggcgcagggtgttggtgtggttggtcttgtagccggcgatctccatgtcacgtggaatggccagcacggtcgtgtagcccacgtgctccggcttattgtggccgtccacccaatggtccacgatcctgccgccaaagcggacctcctccgcctcgtccatcttggcgataagccaggcgtcgcccaggccaagccagttgtcggccagctccacctgcttgccgtcaatgatcttctgcttgaagatgcccagctcatagcagatggaatagccggtggccgggatctccaaagtggtcatggagtccaggtagcaggcggccagacgacccagaccgccattgcccaggccggcgtctggctcggtctcgaacaggtcagcggcggaaaagcccagatcctccagcacctgggtcaaggtgtccagcagccccagattataggcgttcttctccaaagagcggcccatcaggaattccagagagaggtagtggacctgccggccctgggcttcccagacgtggttgctggtctcgatctgatgaccggacatgatatcccgcaggaccatggcgcaggccttgaacatatgattaggggtggcctcatccactgtgcggccaaaattccgcaggagcttgcccacgatcatctcagtgagctgggctttgttgtattcagccataatttgcctccctgttaatttaaaatgaaaataaaaatcacggagcctgtatggcgaaaaatttttccatacaggctccattgtagcagaccggagtgggcgcgtcaattggcggaagggccaaaacagccgccatttcagcccgtttccggcgggatacccagacgggccctgaatctaccagcccaggatacgctgatagatctccagatattggcgggcggagctgttccagctgaagtcggcggtcatgtcctccttctggatgccgcgccatgcctttttgttgttgaaatagaggtccactgcctcccgcaggacccagaccatatcgtgggcgttgatgtcagagaaggtaaagccccggccggtgccctcgaacttgttgtagggggtgacggtgtccttcaggccgccggtctcccgcactacggggacagtgccgtagcgcatagcgatcatctggctcaggccgcagggctcgctgaccgagggcatgaggaacaggtccgcgccggcgtaaatggcggtggacagaggcgcggaataggtgatctgggcggcaaagcggccgggatactggacctgcgcctcacggaaggcggcctcatactgccagtctccggtgcccaagaccaccatctgcacattcatggccatgatctcgtggagggcatcagtgaccagggagaatcccttgtggcccaccaggcgggagatgcaggcgatgatgggcacgtcggcgttctcctccaggcccacggcccgctggagggccagcttgcactcggccttccccttcaccagggagcgggcgctgaagttggcggccagcccggaggtggcggcggggtcatagagctgggtatcgatgccgttgaggatgccctggagctttccgctctgctcgttgatgactccggccaagccgtgggcatagaagggcagacgcagctcctgggcgtaggtgggcgagacggtggtgacgaagttggaggccatgatggcgcccttcatcaggttgacgtccttgtagtagcccagcatcccctcgttgagatagctgcggtccaggccaatgacgtcctccagtacctggtcgccgtagcggccctgatactcgatgttgtggatggtgaacaccgtcttggtgttggccagctcggggacgtggtaccgctcctccagcatgtagaccgggaccagggcggtctgccagtcgttgcagtggatgatgtccggggcccagccgaagtggcccggcgtctcgatgacggcccgggagaagtaggcaaagcgctcacagtcatcaaagtggccgtacagctgccagcgtttgaagtaatactcattgtccacgaaccagtaggtgacgccgtcctgctccagggagaagacaccgcagtacacgtgccgccacgacagagtgacgttgtaatactgctcgaacttcatctggctgcgccactgctctccgaccccctcatacagcggtaggatgaccttgacgtcgtggccctcctgggccagcgccttgggcagagagccggccacatcggccagcccgccggtcttgataaagggcgccacctcagacgaggcaaacagaattctcatagatcagttcctttcttcatatcagcgcggagggaggccccttgtccggtcaggggcctcccctgcgatcagacgatggaatccttggagatggccagcggataggtggagtggcccatcagcatccggtcctgattcacctggacattcttgtcggtgatggtgtaggacagggaggcacctgcgcggatgatggtcccctgcatcaggacgctgttggagaccttggcgcctgcctccacaatgacgccgcgggagaggatggagttttccacctcgccctcgatgaagcagccgtccgccaccagggagtggattgatttggcgtctgggccgtagtaggtggaggggttggactggtccttggtccggatggggcggtcaggatcgaacaggtccgcccgcaccgctgggtccagcaggtccatggagtgctggaagtagtcggccacggactggaagcgggccacatagcctctgtggagatagggcagcaccttcagggtgctcagacggggaagcagaacgcccctgctgaagttgtggatgttatgggcggcgcagtagtccaccatgtccagcagcagctttttggagatgatgtaggtctccagcgactccagggcgttggccgcgtgagcgggattgatggacagatcgctcaccagtccatcgggaccctgggtgatgtagacggtgttgcggggggcgcccttcagctcctgggtgcagaggatggtgatgtcagcaccgctgtccagatgctgctggaacacttcggccacgggcaggttgaccaccatgtcgccccagcccatgatgacatactcctgacggatgttctggagataggtgtagatgcccgccagcgcctccatgttgccgcggtattccccgctgccgccccgctctgccacgccgaaggggggcaggatgcgcaggccgccgtgcttgcggctcaggtcccagtccttgccggaacccacatggtccagcagggactgatagctctcgtggacgatcaggcccacgtcgctgatgcccgcgttgacatagctggagagcatgaagtcgatcaggcggtaccgaccgccgaagggcagagagcaggtattgcgggggcgggtcagctcacctagattggagtcagaatggtaggcaaacaggatgccgtggagatcgttcatacccgctcacctcctttcacatcttcccggaccatggcgctgggcgtcacggtggccttctctcccacggtgacgccgcctgccactacggcgatgccccagccgggagaatcgtccggaggcgcgcccaccacggcgcccgcctccaccacggcgtcctccgccacgatggcgtaggagatgctggcaccggctttcaccacggtgccgggcatgaggatggagtactccaccttggccccctcctccaccgtgacggaatggaagaggaccgagttggccaccgagccgtccacctggcagccgccggtgaccagggagtgggagatcacggcgttggggccggtgacgtggggaggtttgatgggggtgcgggcgtaaatgggccagctggtatcataaagatcgatgccgctgtggggggccagcatgtccatgtttgcgtcccacagagagttgatggtgcccacgtctttccagtagccatggaagcggtaggccatcagcttctcccctgcggcgagcatgttggggatgatgttctttccgaaatcgttggaagacttgggatctgcctcatcatcgataaggtagcggcgcagcttctgccaggaaaagacgtagatgcccatagaggcgaggttgctcttgggctgggggggcttctcctcgaactcatagatctggtcgttctcgtccacgttcatgatgccgaagcgcttggcctcgtccatggtgacctccagcacggagatggtgcaggcggcaccggtcttcttgtgcaggtccaccatgtcggcatagtccatcttgtagatgtggtcgccggagaggatgactacatagtccggatcatacaggtccaggaagccgatattctgatagatggcgttggcggtccccttgtaccaggtgccctggtctccctcgcgcatgtagggggggaggatatgtacgccgccatcggagcggtccaagtcccagggctggccagagccgatgtagctgttcagctccagcggacggtactgggtcagaacgcccactgtgtcgatgccggagttgacacagttggacaggggaaagtcgatgatgcggtacttgccgccgaaggggaccgcgggctttgctacatggctggtcagggcgtaaagccggctgccctgccctccggccagcagcattgccacaacttctttcttcatctcattcatcacctcttggattgataagcacacacagggaagtatcgtataacggaccaggagcaaacggagaaactggtccggttatgcctcttttttccgcttggaggcgccgggcttggcggggcgcttgccggaggggccggttttttccgatttggacgccttgggcttgcgcttggggaacttgcgggtacagcggtagatgacggcggccatggggggcaggtcgatctccatggactggtcctggtcgtggcaggggatgtactcggtgcgtacagggtcctggtcgccaaggcctcccccgccgaaggacacgtcatctgtgttcagcacagcggaccacatcccggcgaagggggtccccacccgataacccttccggtgtaccggagagaagttgcacactaccagcagggggctgccctccttgtcccagcggaggaaggagacagtgttggcttggttgtcatcggcgcacagccactggaagccctgccaggagtcatcctgctcccagagggcgggctgctccagatagaaggcgttggccgccttaaagaactcctgggtctggcggtggggctcgtactggagcaaatgccagtccagggaatattcatagtgccactcgttccactgggccaactcggcccccataaaggtgagctttttgcccgggtgggcaagcatataggtatagaagacccggacgccggcaaacttcatggggttgtccccgggcatcttgccaaagaaggagcccttcatgtggaccacctcgtcgtgggagaggggcaggatgtagttctccgagaaggcatacaccagggagaaggtgatgtcccggtggttgaactgccggaagtatgggtccattttgatgtagtggcagatgtcgttcatccagcccatgttccacttgaagttgaagcccaggcccccgtcgctcaccggataggtgaccttgggccaggcggtggactcctccgcgatcatcagcacgtcgggatgggcaccgaagaccatctcgttgaggcgctggaggaactcgatggcctccaggttctccttaccgccgtggatgttgggtatccactctccgggcttgcgggcatagtccaggtagagcatggaggagaccgcatccacccgcaggccgtcaaaatggaactcatccagccaaaacatggcggaggagtagaggaaggagcgcacctcgttgcgtccgtagtcaaagacgttggtgccccagtcggcgtgctctcccttccgggggtcggcatactcgtaggtgggggtgccgtcaaagtgatagaggccaaactcatcccgggggaagtgggcggggacccagtccatgatgacgccgatgccagcctggtgcatctggtccacgaaatacatcaggtcgtggggggtgccgaagcggctggtggcggcaaagtagccggtacactggtaaccccaggaggcatccaggggatgttcggtgacagggaggagctccacatgggtgaagcccagctccttcacataggggaccagataggcggccagatcccggtagctgaggaactccccttcccccgtgcggcgccaggagcccaggtgacattcatagatgttcatagggcggcggtagggggcgtttttggcccgatagtccagccaggcccggtccccccactggtaaccggagaggtcgtaaagtttggaggcggtgcctgggcgagtctctgcgtggaaggcaaaggggtcagccttgccggtcaggcggccatccttggtatgtactgcatatttatacgcgtcatactgctgaaggccggggatgaacccctcccagatgccgccctgaacaggggtcagagggttggcgttggggtcccagtcgttgaaataaccaaagacacacacctgctgggcgttgggggcccagactcggaaatagtagccggggacaccgtcctgctcgccggcatgggcgccgaagcactcccaggcatgggtgctgtgtccatcactgaacgctctcagttcatgttccggggcataaaccggggcatttttcttcgttttggccaatgaaaccacctcaaatcactcttttgtgtcacaaatggtcgaaaagcacgaacaaaaaccaaaaattctcctctatatttataaaaattatacaacagaagagaggacgcgtcaagtgaaaagccggtaaaatggaatttattcggagccccccggcggccggggagctccgaacagggcgtcagcgggccatcagcagccgctgaaacatctttccaaagatgccgggaatggtgaggcggtccacctgctgggaggcgacgatggggatggtgtcccggacctcgccgtccacagtgaccaccatctgccccagtttctgcccccgctccaccggggcctccaggtcctgggcgagctggatctgggtggagatcaggccctcctcccccttccggaccaggagggaacactcccgctccaactgaggctggacctgggcggtggtgcccagcagcacctccacgggggccagtgggacatcgggatagacccgggcgagcgtatagttggcgaagccgtaatccagaagggctttggcgtcttcaaagcgctgagcggaggtgggagacttcatcaccacggcgatgagttccatgccgtcccgctcggcggtggcggagacgcagtacagggcggaatcggtggaaccggtcttgaggccggtggctccctgatagaagcggaccagacggttggtgtttgtgagaccgaaggcaccgtcccggatagagtccatccagatggtggtgtactcccggatgctgggatggttgaggatcagctcccgggacatgagggcgatgtcgtgagcggaggtgaggtggccctgggcggggaggccggtgcagttgacgaagttggtgtcagccatgcccagctcacgggcccggaggttcatctcggcaacaaaggcggcctcgctgccggaaagatactcggccatggccacagcggcgtcattgccggagaccacagtgatgcacttgagcagctcggagacggacatctgctccccctccttcaggtagacctgggaaccgcccatgccggcggcataagcggagacggtcaccatgtcgtcccgggcaatgcggccgctgtccagggcttccatgatgagaagcagggtcatgatcttggtgacgctggcgggctccagcttctggcgggcgtctttttcgtagaggacagcgccgctctccttctccatcagcaccgcagaggcggcggctgtctccggcccggagggggcggcggaggcggggaggtcagcagcagatacacagggcgccagcagcagggcggccagcgccaaagaaaggaaacggttcatggcgggtccctccaaatccaaatgtttctgtgaaaaggatgtggaggggcgaggacttctatacgccgcagcggaccggtatttttttctgcgcaaatcgttgcatgatgcaaaaatttttcaaaaatttttggcctgcgtggacgggtctgtacaactttttccgaagtcggaccaggggtgaggagggtgatggggtgagcaaggcggaagaaaagcggcagcgagagcagctgatccggcaggtgcgacgactgactcgggcgagagtgaatgacgccgtcaagctggcctatctgtccggggaggcgctggaggccatcgacgggctggacctgacggctatgacggagttcaagcgggcggggaacggagcggtggagatcaagttcaccgaccggctcaaggccctggaaaagctgatggagctgatccgggagaaccgggagacggaagcggaggagctgctgcggaccctgggcgggacggcggaggagccggaatgggagcgctgaggttctcccccaaacagcggcaggtgctgacctggtggcgagaggggtctccccactgggagaagagcgccatcatctgcgacggcgcggtgcgcagcggtaagaccctgtgcttaggcctgtccttcttcctgtgggccatggcccgcttccaggggcggagattcgccctgtgcggccggagcatggagggggtgcggcggaacctgacgggagaggtgctgcccctgttgagagggatgggattccagtgccgggagcagctgacccggggggaggtgacggtgtccctggggcggcggcggaacatcttctgcctgttcggcggaggggacgagggggcggcggcacgcatccagggggtgaccctggcgggggcgctgctggacgaggctgttctgatgccccgctcctttgtggagcagtgctgcgcccggtgctcggtccagggggccaggctgtggttctcctgcaacccggaggggccgggacactggttctatcaggagtgggtccagaaggccggggagcgcaacgccctttacctccacttcaccatggaggacaacccgggcctgtctccccaggtgcgggagcgataccggaccatgttccaggggaccttctaccgccggttcgtgctgggggaatggaccgcggcggcagggctggtatatgacttcttctcccgggagatggtgtgcgagccgccggaggggcgggcggcggagtggtatatctcctgcgactacggtacggtgaaccccacctctatgggactttgggggcggtggggggaggtgtggtaccggatggaggagttctattacgactcccgccgggaggggcggcagaagacggacagcgaatacgccgacgcgctggaggcactggcggacgggcggcccatcagggaggtggtggcagacccctccgccgccagctttctggagtgcctgcggcggcggggctggcaggtgcggcgggcggagaacgaggtgctctccggcatccgcaccacggcggagctgctgcggacgggccggctggtcatctgccccgggtgcggagacgccatccgggagttcgggctgtaccgctgggacaccagcgccggagggcgggaccaggtgtgcaaggaacatgaccacgcaatggacgacatccggtattttgccgtcacggtggcggcaaaggagcgcggcggcagctgggccgggagcgtggaacggaggatattttgaccggcgggggccggaagaggcaaaggaggcttttgcgatgaagcggcgggaacgaaacaaggggcaggcccgggcggaggcggtgcagatccgggagagcggacggcatcccttcggcgtgctggaccggtatgtgcccctgggggcgggggagctccagctctaccgggccatccgggaggcggtgcccatcctggacgcggccatctggaagctgatccggctggccggcggagtggcggtgaagtgcggggagcccgccgcccaggcggggctggagcggttcctccgtactgtccccaccgggcggggacagcggggcatccagtcctttctggactgctatctggactccatgctcacctgcgggcggggggtgg

SEQ ID NO: 13544 - DNA, 11081 bp, Unknown
  gut microbiota DNA sequence
gactgccagggccgggagatcgccgctctgctgtgcgccggaccggagcaggtggagatccgggagggagactcgcccctggactttcagctgtgtgcccggggcccgggcggaacctgtgagcccctgccctggcaggagctgctgctgttcaccccttttcagccggagacagagcacccctacggggtgtctctgctgcggtccatgcccttcctcaccgacatcctgctgaagatctaccaggccacggggatgaactgggagcgaatgggcaacgtgcgcttcgcggtcatctgccgccccggagagggagagggagcctatgcccaggagcggtgccggcaaatcgccggggagtggtccgccgccatgcaggcgggcaagcagggggccgtgcgggactttgtggcggtgggggatctggacatcaaggtcatcggggcggacaatcaggtgctggacagccaggtgccggtgcgtcagatcctggaacagctcgttgcccgcaccggtatccctcccttcctgctggggctgtcctggtccagcacggagcggatgagcgcccagcaggccgatctgatgaccagcgagatcaccgccctgcgccggaccctggagccggcggtggagcgcatctgtgagatgtggctgcggctccacggctggggcggcgatgtgacggtggactgggcagacatcaacttgcaggacttcgtggaggaggccagagcgaagctgtatctggcccaggcggaagccatcagagaggaggaacggacatgaaggtagaaaaggaggcccttgggggccagagggtggagcccacagaggaggagctggccctcgtcaaccggcagagccggaaggagctgacagcggcggaggtctatctgttcgcggtgcggctgtgcgacaacgaggtggaccgggacggggagcagtttccacaggccaccctggagcagctggcggagctgtttgtgggcaagagcgggatctttgaccacaggtggagcgccggcggtcagacggcccgcatctaccggacggaagtggtccgggaggaggggatacgcacggcgctgggagagcccgcctgctatctgaaggggtacgcctacatggtgcggacccagggaaaccaggacctgatcgcggagatcgaagggggtatcaagcgggaggtcagcgtgggctgcgcggtaaagcgggcagagtgctccatctgcgggtcggacatgggcaggtgcgcccacgagaagggaaagcggtacgacggcaggctgtgctgcgcgcgtttgctggaggccacagacgctttcgagttctcctttgtcgcagtgcccgcccagcccagggctggagtgatgaagcgggccggagggagcccttcgctgaagcagctggcgctgggagagcccgccgccgcagccgagctggaagatctggagcgggcggccgagctggggcgccgctatctgacgggactgcggaacgaggtggtccggctgggcctgctggcggagcgccaggtaggggcggagaccctccggcacatcgcggaccggctggaggaaaaggagctgctggagttgcgggagaattatcagcggcgggcggcggagcgctaccccatcgccccgcagctgtcctacggtaacggggacgggatgccggagcggccggacggggcttttttgatctgacggcggggccgtctttacaaaataaatcgggagggatcgggaatgaacaaggtttcctttgaggagatcggcgcagtggcggccacctttttcgcccagaaggaggtcaaggcaggacaggtggtgaagatgacgggcaacggccaggtggggccctgctcggccggggacaagttctgcggcgtggccctgtccaatgagaacgggtgcgccggcgtacaggtgaagggattctgcccggtggcggtgacgggctccatcgatttggggtggaacgtgctggcggcggatggggccggcggtgtccagacggcgaccgccggggccgaagagtccccatctggggtggagtgtctggtggtcagtacggacacggcgggcaagcgcgccgtgatctgcctgtgagacagagaggagagagctgagatggcctattgctacgacaatctgaagctggagaaggggatgtatcatgaggcggggcggtccttcactcaggtgctggagagccgggacccctcggagcagtaccggggtaccgccctggaggggctggatgcctttcagcggcagctcaagcgctttgatatcaaggtgaaggggacgggcagcgacgtggtggaaaagttcttccgcactgccgactccgccgtgctgttcccggagtatatcgcccgctcggtgcgccagggtatggaggaggcggacctgctgccccagctcaccgccgcggtgacacggttcgacggcatggactaccgctccatcacctccgaggcgggaggcgaggagaaagagctgcgccgagtagacgaggggacagagatccccagcaccacggtcaaggtgcaggagaatctggtgaagctgaacaagcggggccggatgctggtggccagctatgaggcggtgcgctgccagaagctggacctgttttccgtcacgctgcggcagatcggcgcccacatcagccggatgcatctggaggacgccatccaggtgctgatggagggggatgggaacggcaacgccgccccggtggacagcacggcaacggaggacacggtgacctatgaggacctggtggacttctgggccaagttcgacccctatgagatgaacacccttctggtgggcaacgacgtgatggtgaagatgctcaagctggaggagttccagaacccgctcaccgggctgaacttccagggcaccggcaggctgtccacccccctgggggccagcctgctgcgcacctccgccatgcctgccgggaccatcatcggcctggaccggcggttcgccctggagatggtgcagggcagcgatgtgctggtggagtacgacaagctcatcgaccggcagctggagcgggcggccatcaccaccatcagcggctttgccaagctgttccagggcgcggcccgggtgctggagctgtgatggaggaacagatcctggcctttgtggaactgatgggggggcacgggaatgaggagctgctccgccccctgtgtcaggcagcggagcgggagatggcgggccggctgagggaggggctgtcccccgaggcatgcgggcccgccttcccggtggccgcagcctggctggtgctggccggactggaggcagggacggacggcgtgacctccttttccgctggcgacctgacggtacataccggaggagacggggcgggagccatgcgacgccaggcggagcggctgatggctccctatttggcggacggatttgcctttcggggggtgctggggtgagagtggaaaccatttccgccctgctggaccggtatgggcagtgtgtgacgctttaccgcggcggcgtggaggcgggaagagaggtgcgggccttcctccagcccctgcgggaggcggggagggaacaggcccgcccctcccccctggggctgcggcgggaggaccggtatctgatgctgggggagccggacgtcccggcggcccccggggaccgggtggtgtggcgggagagcggatatgaggtccgcaccgcccaccccatctatctgggggagcggctgtcccactggtgggcagtgctggccccctggggcaaggaggagacatgagcggcggactggaacagatccgggaggggctgaccgcccacctcaatgggaagggtatccgggcagtacctgcctggagcgggacggcgcggacgttcccctgcgggccggtggccgcagtatccctgcgggggtgccgctggggcccggccggctttcaagactatctgggggagcgatatgacccggaggcggggcgctgggaggagctgtatgggcgcagggtgaagctcaccttcggtctggacctgtacggggagcgggcgcagggggaccaggcactccaggcggccttcgatgccctggcgggggcgctccatcggaaaggtcccccggggatgcggctgctggagctctcctgcggggagacggagtatgaccagggagggcagctgctgaggcggccggtggaggcggtatatgaggcgtgcctctatgccgcggcggagccgggcggccttttccaggactttgagatcagaggaggattggagccatgagcgtgaccacacatgagcggccgggggtgtattcggagtatgatgcctcctcggtggtgcagggcagacaggggcgaaagatggtggggatggctgccatccacgccacggccccggcaggggtgccccagacggtgaccagctacgagggcgcgctgatcgccttcggcagcaccggggggcaggatatgacagaactgatccggctggcactgaagaacggggcggccggcgtggtggcggtgccggtggcggacgaggagggttatgaggcggcatttgccgccctggcggcgatggacgatatcggagtggtcatctgtgacagcgtggaccgggaggtgcagcagtccctgcgggacagcgccgccgccgcctctgccgcccgccgggagaggatcgcggtggccgccggcggggcgggcgagacggtgacagagctgctggagcgggccaaggcgctgaacagcgagcgggtggtgctggtggcccccgggggcaccgacgaggaagggaaggccgtctccggcctctccctggccgcagctgtggccggggctattgccgggacaaccgaccccgccctccccctggggggcgcggtgctcagcggactgtatgggctggagacaacctatggggacaacgacctggacctgctcatccggggcggcgtgactccggcagagcggacgggtggggtgacctcggtggtgcggggagtgaccacacgcaccactaccgacgggacggcggacaccacctggagagagctgtccaccatcctggtggtggacgacgtgatccccggcatccgctccgccctgcgcagcaagttccaccgggccaagaacacggagcagagccggggggccatccgctcccaggtggtgctggagctggagaaccgaaaggagcgggagatcatctccggctatgacaatgtggcggtgtccgccgacccggacaaccccacggtgtgccaggtggagttctccttctcggcggcccaggggctgaaccagatctggctgacggcccacatcaccgtatgacaggccgccggcaaaggacagacagtgaggagggagcagagtgagtatcgcaggatttcccaccagcagcgacatctatctggaggtggatggagtcaaggtggcagtggtgcagagctattccgccaaggccagcaagaccagctcggcggtggaggcctttggagagagcgagccggtggccacggtgccgggccagaccagccatgtgctggagctgacccggttgtacgccaccgacgaggccatccgggacggcatcgacttttacgggctgagcggtttctctctggtgatctgcaagccggaccgaaagatcatctattccgactgccagtggagcagcatcagcgaggcgggcaccctgggtgccatggtggtggagaaggtgaccatcgtggcctccaagcgcattgagacgggggtgtgatagtggtgtggtcgattttggcgggcgcagaccgcatggaactggagaatggcatggagctgaggctgctgtccgccctggaagttctggaggcccggcgggaggcggcccagctggcggagagccagggggagcgggccctgtgctccaacgcatgcctgctggcccgggcgctggagagcggagaaaagccggtatttgacagtggacgggcggtgctggcagggctgacggtgagtgagatcgccgctctggccgggcggtggagagagttcgaccggaaggagaacccctccgccgcaggaacagcggaggagttggaaaacgtaaaaaaaaactagccggcagccccggggatcgcctgcgttggagggtgctgaagcagttcggcgctctgcccaccgagaggcgggccagacagatgaaggagcgggactacctgtggtgcctgctcaaccaactgctagatgaccaggaggagctggatcagctgtgccccacatgccgggcggaggcggagcaggagcggtgccccggctgcggggcgctgatccaggcttccggggtgaacccctcctttgacatggagcggtttcgacggctgaaggagggcgagggcacttgagagactatctggaggagctgctggccgggacggaggacgcgctggaccaggcggaggcagagtggacggagggggtctcccctcccctgccccgccgatccaaggagcggccggaggcggcgggcggcccggcggagccggagagaagcgccggggccgaagagacggccagggatgggaaaaactggatcgaaacagagcgggaggggcagtctcgatccggagagacaggggcggttctggagtccagggagcgggcggaacagccggaaggtccggcagggctgaggacggtcctgtccgaccgcccactggagggggatgaggcgtccaccttgtcctggctgctgtgggccggacggcaggggcgtgccgtccctcgggagcggagtctggggagacccgaggcgggggccgggactgtgccggagatccggggggaggaacgcgcctccctctgggagacagagggggtggcgggcacccgacggctccaggccgccatggaactggcccggcgggcagcggggtaccgccgggagcccagagcagaccgggcggggccggtctcccttcggccaggatcggatgagccgcttctccgggagcatgactccgcacggacggtggaccggatctttcgccgggatgcccggcggtacgacgggggctttgccctgttctgagaggaggatctccattgaagctggcgcccatgcgctacaaggactatgtgtggccccacaacccaagggtgtactccatcgactatgagcggaagatggcggtgaacaaggtgcccttcggcacctaccatctccaggacctgggccggacccgccgggtgatgcggggagagggggaatttgccggagagggggcctattcccagttcggcctgctggccaacaccttttatgacccagggccggggctgctgatccaccccctctggcagacggccagtgcctattttgtggagctgcggctggagcaggagcccagaccggactatgtgcgttactccttcgctttctgggaggccagcggcctgtacagcggagcggtgcaggaggtcacccggaccggagaggcggcatccggcgggaacggcggagtgctgagccacacggtggagcagggggacacactgtgggcaatctcggcccgatacggggtggggatgacggagctgctggcccgaaatccccagatccgcaatccaaacctgatcctgccgggagagaaggtgacagtccggtgacagcctatgtgaccacggcggcaggccggacctttcagctccccgttccgctgtcctgggagctgaactatactgccggggtgcccagcgacagcttttgggtgcgctgtccctggcaggcgagccaggggacggacccggcggagtgggtccgattctccgcagcggaggcgggcgagacggtgttttccggggtggtggacgagtgcgaggtgaaccaggggacggagggcctgcggctggaagtatcaggccgggggatggccgccctgctgctggacaacgaggccctgggacaggactacgggaccgccaccctggaagacatcctgcgagaccatgtggccccctatgggatcgaattggcgggagaggccagcctgccagcggtgagccccttctccgtgcccactgggagcagcgagtgggcggtgctctatgagttcgcacaatactgcggcggtgtgtgtccccgctttgaccgggcagggcggctggtgctggaggggtggaccgaagtggaaaatctggccataagcgatgccacaccggtgaccagtctgacggtccgagaccggcggtacggggtgctctcccagatcctggtgcgggacagggtgcgccagacggtggagcaggtggaggccactgactttctccggatgggcggcaggtgccgccgggtgatgaccatgccggggcggagcagctatcaggccatgcggtacagcggacagttccagctggaccgctccgccgcggagctggtccggatggaggcggtggtgccggtcctgttctatggaaagccgggggacctggtgcggatacagaggtccgactgggaccgaaatggcagctggcgggtggtggaggcctcagtacaggcggacgaggcagggggacggacccggctggagctggcggtccccgacgttgtgatatgaggtgagcgaaatgtggacatcagaccggagaaaaacacggcaggccggtgagagctgggtggactggggagaagtgaccctggagggggacccggcaggggcctatctggacggtgagcggcggcagctggcggtctatgggccaggcggctactgctggaagccggtcctgggggaccgggtcctggtgctgaaggcgggacaggggggcgagtccccctgcgtcgccgggaagcggcagggggaggcggagacgctgggcgctggggaggtgtccatctccagcagcggggcggagagcgggctgctcctgcgcacggatggccgtctggagctgaacggtcaggtaatggtgaacggccagtcgctgaacggcctgatccggcagatcgtgctggcaatcctgggaggcgggtgaagggaatggagcttcagatccaaaacggagactatgtgcccgacggactgggaggcttccgccggctgaccgggggcgaggcccttttgcagcgggtcctgttccgcctggtcccgcggcggggggctttcccctttatgccggagctgggcagccgcctctatctggtgctccgggagaaaccggcagcccgccaggcgctggcggagcagtatgtggcggaggccctggctggagagagcggactgcgggtgacagaggtatcgctggcccaggagggggaccggggcctgctgactgtccggctggactggcagggagaggcactggccgtccagacgctgctgtgagagggggagcggaatgaaggagctggaagagatctatcaggagatgctggactgctttgcccagaggactgggctggaggcggcggagagctgcgatctggcggtgcgcttctacgcggtggcggcccaggtgtacgccctgtacgcccaggcggactgggtgctccggcagtgctttccccagacggcggcgggaagctgcctggacagccacgcccagctgcgggggttgagccggaagcaggccaccgccgcggaggggagcatccggttttctgtggcgcgggcggcggatacggaccggcctatccccgccgggaccgtttgcatgaccccggggctgatccggttcgagacggcacaggcggcggttctggaggcaggggcgtcctgggtggatgtgcccgcccgggcgctgacgccgggcagtgcgggcaatgtcccggcaggggcggtgaccgccatggcggccgcgccggtggggatcgccgcctgcaccaaccccgccccctttgccggcggcggggacgaggagggggacgagggcctgcgccagcgggtgcttagcaccttccggcggttgcccaacggggccaacgccgcattttacgagcagggggccctctcctttgaccaggtggccgcggcgtccgtactgccccggagccggggcaggggtacggtggacgtggtggcggccaccctggaggggatgccggacgaggagctgctgggccagctgacggactatttccagcagcgcagggagatcgcggtggatgtgttggtgcgggccccggaggcggtgacggtggatgtggcggtcaagatcgacgggggcgcggaccaggcgggggccgcagagcgggtgaagaccgccctgcggcagtggttcaccggagagcggctggggcaggatgtcctccgggcccggctgggaagcctgatcttcggctgtgaaggggtaaaaaactacgagctgacggcgcctccagaggacctgtccttagagcccgaccagcttccagtgcttgggaccctgacggtggaggcaatgcaatgagctacgggagatatttgcgggagctgctggccccgctgaggctctatgatctggaggcccccttcaacggcggggagctgaatgtccagggcggggcgctggacggggtggacacctggctggcggagctgcggcgggagagcacgctggcggaggcggagagctgggggctggagcggatcatcgccctgctggcccggcggccggtagcggacacgccgacggggatgcggaaagccctggctgcgctgatgcggatcggcggggacagcttcaccctggaggccatcaacgccaccatctccgggtgcggcgtccatgcccatgtggaggagaaggagatcccgggagaggtggtggtctccttccctgacattccaggcatcccaaagggatttaaggagatccgggagatcattgaggatatcctgccagcccacctggggatcgaatatgtcttctggtatattacatgggaggaactggagagaaagatctcctgctgggcggagatcgaagagcgccagctgacctgggagcagctggagacactggtggatgaaacagaggagtgggcggggacctgacagtccccgcccgctcctctgtctgg

SEQ ID NO: 13545 - DNA, 388 bp, Unknown
  gut microbiota DNA sequence
agccacagcatggccgacgcgccgatgacgtacagcgaccaggtcctgtccgcccgcagaaacagattgagtacgccgcagcacaccgccaccgaggcgagcatggcggtaatgagcagcgccacctcctgtttggccgccggcgccacctccccccgccgggtgggaaagggcttgggagagacggtatccaccggttggccggggtccagaacccgcgtatggcacagagggcagaaggacgccgtggcgtccagctccacgccgcaatgaacacagtaagacatatgtgggcctcctttggcttattccgtccggttgctctccaccttcaccggaatgccctcccgcaccagaaagcggaaaaaatcccgctcggtatcgctct

SEQ ID NO: 13546 - DNA, 40748 bp, Unknown
  gut microbiota DNA sequence
tacatagagctgatatttcttctgatcttatgagataaatcgtagcataccaaaatttttataccttccccagcaaaaaataagggagccggaccaacgccgactccctatatcgtttgattattttagggcaaacatcccctattagaccgcatttgcgatcatcccccaatataacacttgggtgccttcgccagcctaatcagtcagctctctcatcacactcccccacatcccgtgtggtattttcggcaagtgtggtaatactgtggcaacacagaaaatcatgtcattttagtacaatttagcaccggcaggaatcgcatcatctaacatgagcaaattcaacccttcgtgtccgtcatactcgtacacagcagagatcagcattccctcagacggaattcccatcatcattctagtgggcaaattcgtgattgcaacgcaggttttacccaccaattcttcaggagtataataggtgtgaatgccacttaaaatagtccgtttgcgctcagttccgtcatttaatgtgaacttcagcaactttttagacttttcgaccgcttcacaggattcgattttcaccacacgaaaatcggattttgcaaaagtttcaaaatccacaaactcctcaaacaaaggttcaatcttcacctttgaaagatcaatgcgtgcgctatttgtggacacattacgagttacaacagcttgattttccccttcactcttcgtgttcgcaccatcatttttttccaggggcttcatcgtggggaacaaaatgacctcccggatggagtcgctgttggtgagcagcatgacacagcggtcgatgccgatgcccagaccgcccgtgggaggcataccgtactccagggcggtaaggaagtcctcgtccatcatgccggcctcgtcatctcccttatcccgcagctccacctgcttctggaagcggccccgctggtcgatggggtcgttgagctcggagaaggcgttgcccatctcactgtggcagatgaacagctcgaaccgctcggtgagccgggggtccttgggggaccgcttggccagtggggacacatccaccggatgcatggtgatgaaggtgggctggatcagcttctcctccaccttctgatcaaagcactcatatagggcgttgccccaggtcttgtccgcggtctcgggcagctccacgccgatggacttggcggcggccaccgcctcctcgtcactgttgatggccatgaagtcgatgccgcagtactgcttcaccgcctcatgcataggcatgcggggccatccgggagtcaggtcgatctgctccccctgccactccacctgataggtgcccaggatcttctgggcggcggaggagagcaggtcctcgaacagatccatcatgtcgttgaaatcggcgtaggcctggtagagctccacggtagtgaactccggattgtgcttcgggtccatgccctcattgcggaaaatgcggccgatctcatacacccggtccagaccgcccacaatgagacgcttcaggggcagctcggtggcgatgcgcataaacatgtcgatgtccagggtgttgtggtgggtgatgaagggacgggcagtggcgccgccggagatggtgttcaggacgggggtctccacctccatatagccccggccgtccaggaagtcccgcacatgcttgatgaactgggagcggatgatgaagttgcgcttcacctccgggttgacgatcaggtccacatatcgctggcggtagcgcagctcggtgttggtcaggccgtgaaatttctccggcaggggcagaagggacttggacagcagggtcaccgcctccacccggatggacatctccccccgctgggtgcggaacacgatgcccttcactcccacgatgtcgccgatatccagcttcttgaagcggtcgtactcctccccatccatctcgtcccggcgggcatagagctggatgcggcccgacttgtcctgcaggtcgcagaaggacaccttgcccatgccccgcttggacatgagccgcccggccagcgagacttggctgccctccatggcgtcaaaatccgccttgatggcggcgctgtcgtgggtgacctcatatttggtgatctggaaggggtcacgcccccccccctggagctccttcagcttgtcccggcggatctggagcagctgggacaggttctgctcctggttcttctcttcagccatgttgtctctctcctatctctgtggatggcggggcgctcagcgctgctccaccttcagcagcttgtactcgatgcgtccggcgggggcgtccaccaccacttggtctccctcgctcttgcccagcagggccttgccgaagggggagtcctccgagatggccccgttcatggggtcggcctcctgagagcccacgatcttgtacaccatagtctcgtcgaattcctcgtccagcacggtgaccgtggagcccaggcggacagagctgccgtcagagggctcctcctcgatgaccacatagttggacaggatctcctcgatctcagccatgcgggagtaaagcttgccctgctcgttcttggcctcatcgtactcgctgttctcagacaggtctccgaaagagcgggcctccttgatcagctcggccacttccttctcccgaactgtcttcagataattcatctcgtcctgaagctctttcaggcgctgggggctgagtttatattcctttgccatgactcgttgcacacctttcagaccgctctccggggcggccccggggcggatgatcgttccagaatatgaaaatgggtatatggatgcagtatgtgctattatagtgttttcggctccgtctgtcaagtaaattctaggtcagtgcgctccaaacgccctgtctcccacaggatctccagcaggggcagccactggccctccttctgccgctctaagccggggaccgacaccaccagccccgccagatccgcttccggcccaaacagggagaggaccgcctgccccgcctcctccgcccggggatcgaagcggatggccgcctggacgccgtcccagtccggccgcagggccacaccgtactgtcggtggaggtagcgttccagctcccctccgcccgtctgtacggagaggcacaaatcccgcaccctggggcacagctcctccgccgcccggaccagatcccgctccgcccggctcccccgcagggccaccgccgcccgcagcgggtcctccccttggcggcgcagcagcgccagagccataggggcggcgcaggaccggagcaggggcagggggtccacagggcgcaggccggcccggctcagctcctcccagaaggggaaatcctccggcaccagcacccgtgccgccccctgccgggccagccgccgggccgcccgtcccgcccgtctgcgggcccagaacccctccgggtccagcgccactcggagcaccggcaccccatggagcggggcccggaccaccttagtccccttcccgtccctctggtacaccacctgtcccagcacgcccctcacctcccccacagcatatgccgccgccgtccccgcctatgcctccgggcactgagaaaggcggcgggtctgcccccgccgcctgagattgtcgaaaaagtggcaaagccactttttcgagaaagatgcagtctgccgcgcgtagggtttgaccgcctgcggcggacaaccctcacatttgcagcctgagcagtgttttccccgatgcacaggtcgccggggaaaacggatctaaactgggttcgcgcctgcgggcgcgaactctgcgaggctttttccacaagctgaggcggcgggcctgtgcccgccgcctgaagtctctgtctgtgtcccctatttttcccaggggacgtcatttttcttggtctggggcgtcctgtgctccagcaggcggcgggcggcctcccgctcctcctcgcagtgattgctccaggtctccccgtccgcgatcttctgcaggcgcttctcgctgtacgaggcatagtctttcatggctatctggacccgttcctcccgctgctgttccagccgctcctcatgtctccgggctctctctgccttctcccgctcctcctcctggcggcgggccacccattcctcctccgcgcagaagcgcagggcccggcagcggccgcaggaaaacagctccaccgggatggctccctctgcccaagcgttggcatcccgtccgaacagaaaaccgtcgcttacagctccagttcggaggtattccatccccaggctttgaaagatcccgccgcagggacaccgcatctcttccatgccgcgctcccctctctcagctcacagtgtagctcacgctcttgccactggcccgcagtgtaaaggtggaacctctaaaatagttcagggggtcctgacgctgtccgttcagacgtacctcaaagtggaggtggtttccggtggaggaaccggtggtccccaccaggccgatggtctgtccctgggtcaccttatctccctcactgaccagccgcttgctcatatgggcgtagagggtgctctctccgttggcatggctgatgaccacatagttgccgtaggagctgttgtaggtggaagtaaggactacgccgctcttggcggcccagatgtccgttccgccggcggcggcgatatccactccagtgtggttgttgggccgcccggtgaccgggtgcgtacggctgccaaacagggaggtaatggtggtggcatagctgggccacttgaagcccttttcactgacgatggtcacgccctgggcagccagctgggcctggagctcccgctctttccgggcgatctcgttgtccatggccttggccgccgcctggagcttggcctccatggcctccaactcgtcctcctggctgctgatctgactgatgagggcgtctacctccgcctgctggctcttcagcctggctttggcgtccgcctgcttctgccgggcctcctcctgggcggtgcgggcctcctccagctccgccttctcctgctcgatctgggcctgggtggccagcagctcgtccatgatggcattgtcataggccatgatctcctccaccatcatgaagcggtccagcatgtcagagaaatcctccgcgttaaagaggatggcccaataggagacctccccctcctcctccatatagcgcacccgctcacagaagagctgatactgctccgcctcctgctgctccagctgagccagttcgtcctccttctgggagatcagctcgtcatatttggcgatctgtgcgtcgatgttgttgatctccgactggatcacgttgatctgctgctccagcaggctcttctgttccaatgcctcatccttgtcggcggcgatggcgtttaactgggcctggatctccttttgctgctgctccagctcgccggcgctctccttcagcgcatcgatctccgcctgagtcacggcggaggccggcatggacaccgcccccggcagagccagcagaaaggaggcggaaaagaggaccaccagcgccaggctgatggcggggatagcgcgtcttttcatgggccgcctcccctcagtggacgaaaatattggctacgatgggcagcagcatcagcagggccatgatccctgccagcaccgccatcacgatcctctgtgtcttttttctcatacctgcttctccttatctcatacctgaaggaacttccggatggccaccaccgagccgcccacaccgatcaccagtcccacgccgcagaagaccagcacgatgttccccgccatggaggcgtaggacagaacggtgatcaggctcaggccgttggtctggaggatcagccgggagaccgcctcatacagcccccattggatgaagaaagccaccagggcgcctgtaaggcccaggatcatgccctccaccacaaagggccagcggatgaagccgttggtcgcaccgcacatcttcatgatggcgatctcctccctgcgatagaaggtggccagcttgatggtgttggcgatgatgaacagggacaccaccaccagcatggccaccagcacagccgccacgcctgtggcaatgttgcgcaccatgacgaagccctgggcgatctcaatggccgcctgggtatgggccactccccggacagcctccacctgagacacggtggccgccatctgctcgatatccttgacatggatctcgaaccgatcccggagcacctcggggggcaggctgtccatcaaatcgttctgctcccgccctgccttaaaatcctccaatgcctccgcccttgtgacaaaggtgacctgggacacattggggacagcctcgattttcggctgaagggcccgggcctgctcctccgagtagctgtcgtcaatgtaggccaggaacagattctcgtcctccaggtcccccagcatgtggtccaggttgaccgccagcagggtgaaggaacccatgatcagcaggcaggccacgatcatgcacacagcggcaaaggacatgaagccgtgggtgaagatagagtggaagccctcgctgagatagtattttccgttaaatcgtctcgccattgttgtaatacccgcctgtctcgtcgctgatgatccgtccgttctcgatggcgacgactcgtttggagaaccggttgaccagggatttctcgtgggtgaccaccagcagagtggtacccagctcgttgatgcgctccagcagcatcatgatctccagggatcgctgggggtccaggttccccgtgggctcgtcggcgatgatcatgctgggattgttgaccagagcccgggcgatggccacccgctgctgctcgccgccggacagctcccccggatactggtccgccttcttctccagacccaccagctccagcacataggggatgcgccggcgcagctcccgggtggaggtgccgatggcccgcatggcaaaggacaggttctcatacaccgtctttttctcaatgagccggaagtcctggaaaatgatgcccagcgtccgccgcatgtagggcacctgtcccggacggatgttgttcatgttgtagccgttcaccatcagccgcccctctgtggtggcgatctccccggtgatcagcttgatgatggtggacttcccggagccggatggccccaccagaaagacgaactccccgtcgtcgatccgcatggagacccctttcagcgccttggtcccgttgtcgtattctttatatacatcgatgaaccgtatcatgtgtccctccgccagacggccgccactcccccaagtcgtgcctttggcacgctctctcccaggggcgggcggctgatgcgcttttctcaaagtgtatcacagtttgtgtgttatgtaaatggatttttgcggccattttgtcgcttccgctcctatattgtagcggcgccgccccggaacggcaacccctcccacaaaaaaattttggcattttggtcctccaaatttttcctcctctcacaaaaaatcaacgcccccgcgccggacccggcgcgggggcgtgctgttcttcggttcaggattcgattccccgggaaatgaggtacttcttgaccatcagcgccaccttgaaggtaatggcatcatcgaactcccgcaggtccaggccggtgagcttcttgatcttctccagccggtacaccagggtgttgcggtggacgaacagcttccgggcagtctcggacacgttcaggttgttttcaaagaacttgttgatggtgagcagagtctcctggtccaaagcatcgatggggttcttcttaaagacctcctggaggaacatctggcacaggatggtaggcagctgatagatcagccggccgatgcccaggttctcatagttgatgaccgtcttctcggtgtcgaacaccttgcccacgtcgatggctacgccggcctccttataggcccgggccaggtcccggatgtggttgaccacggtgccgattccaatgaccaccttgatgcccagttcctggttcaccgcggtagagatctgcttggcgatcttctggagctccttggcatccgccccctcgggcagctgcttgatcagggccacgtctgtctcattgatggagatgacaaagtctgtctgcttgtccgggaacaggttctggatcacatcgatggtgctcacatccgcctgccccagctggcgcaccaggaaagctgcccggggcacctcagagacaaagtgcagctccttagcctgggtatagatgtcccccagcaggatattgtccgagatgatgtttttcacaaaggtggctttgtcgtgcttctcctcataagaggtcttggctccgttgaaggccaccaccgccatggcgcacagggccgcgctctccgggtcctccccctggacaaaagcggcgtaatcgaactgagcgccccagccggccagcggcttgaaggtcttcccctcataccgggtgatcccgttgtcggcggcattgatggccgccaccgcgccggaccaatgctcaccgatactggtgagctcactgcatgccacgacgatgccgtccgcgtcaatgacacccaccacccggtcgatgccgtccttcatctggagtacgactccctggaacatcctgctggacacattgatccctcccatgtgttacttgtacactacgcctattataacggttcccccccggttttggcaagaggttttgcataattttttgttcaaaacgccgaaaaacctggatctcccgctgttccccgccgcagcagcgccttctcctcccctgtcagcggccgccactcccccggcgccagcgccgggtccagggcgatgggccccatggacaggcgcttcagatagaccaccggcttcccccgggcggccagcatccgcttcacctggtgatatttcccctcccgcagggtgacatgacactgggagccgtcccccagcggctccagctccgcgggcagacagtgcagcccgtcccccagcaccatccccgccgccagggcctcagcgtccgtccggtccagccgaccctccaccttggcgtagtacaccttgtccacgtggtttttgggggagagcagggcgtggccgaggggaccgtcatcagtgaggagcaggagcccctcggtatccttgtccagccgccccaccgggaagagcccccggcggcgcaggtgctccggcagcaggtccagcactgtcttctgccgccggtcctccgtggcggacaggaggcccgccggcttgtggagcatcagatagacgaaaggggcgcagtccacccgctctccgtccacagtgaggccggccgctccgggctcacacttctcctccggccgccgggcagggacgccgtccacccacacccgcccctggcggatcagttccttcacctcccggcgggaccaccgccccgtggaggagagcagcttgtccagacgctcctgtgccatacttgtcctcctgttcctccgccccctcctgcctgccggccgtctccgcgctcctgtccggactttatgagggcaggcataaatttgtcccgcccctcatagacatgagtagaaaccaaggcgttggaaggagaatgcgctgtgataatcctgactgcaaaactgccccgccaccgaaagctgaccatcggggtggccgtggccgccctggcctgctgcgccgccctggtgctgaccctgggcggcggccccgcccgggaggcgtccgcctctgccgtccccagcccaaagggggtcaagagcaacgaggaccgggtggcctacctccagtcctacggctgggaggtcagtgccgagcccctggccaccgaggagctgctcatccccaaggagatggatgcgagctatgacgactatctggccctgcaaagcgggcagggcttcgacctgtccaaatatgccggcaagcgggtgaagcgctacacctacgagatcaccaactaccccaccggtgagaccggcatcctggccaatctgctgatctacaaaaacacggtgatcgggggcgaggtcctctctccccagctggacggctttctccacgggctggccatgccctgaaggccccgtggacggggcgcccggctggtctgagggctcacttctccagcaggtggacgtttagatgatcgtaggtcatctggatcccgtggcgctggaaagcggggcgcaccccctccataacgccgtaatacacgtcccagtagtcccccgcggcggtccacacccgcaccacatattcgatgctgctggcaccgtacttggagatccagatggaaggggccgggtcctccaggatctgcgggaactgggccagcacctcccccagcgcctgcttcaccgtctcagtcggcgcatcgtaggaggcggagaaggtcagctccacccgccgcttgcccagcttggtatagttgatgatcttggccgccgccacctggctgttggggataaagatctccttgttgtccacggtggccagggtgctgtacgccaggccgatggaaatgaccgtgccccccaccccgtccgcctccacatagtcccccacctcgaagggcttggacaccaggatcatgatgccccccgccaggttggatagggtgttctggagcgccagggagatagccaggccggccacgctgagcagggcgatcatggaggccaccgggatgccaagggagtccgccaccaccaggaccaggaggaaccacagggcgatccgcaccacagagcggatatagccccccactgaccccaggttctgagatctggacagcatccggtccacgatccgcagaaggacccggatcaccacgacccccgccagaatgagcagggcagtgcggaacagggcgctcaggtccagggcattcagcttcagcccttccagcacgccggagaccagttcttcggtagacatggcagttttcccccagttcgacaggatctgtattttggtttttattataacaagctttttcccctcaggcaaggagaaacgcggcaggccgggactcggtccgccgcgtcactttttctgtttggagcgtcagctctccccgccccccgcgtgccgtttcaggcaggcgaaggtctccgggctgatgtcgtgctcgatgcggcaggcgtcctctgccgccacctccggcgtcacgcccagctggatcagccacttggtcaggaagcggtggcgctcgtacaccgactccgccgccgtctttcccgcctcggtaagcaggatgcggccgtcccgttccatggtgatatacccgctggagcgcaggatggacatagcccgactcacagatggcttggagtagcccaggtgctgggccacgtcgatggaccggacgttgcccttctgctcatggagcaccaggatggcctccagataatcttctcctgattcatgcagcggcatagggactctcctctcatgtccgcctgcggcggatctgctttttattgagttatattatcatgttttggaacggatttcaaccgcgatccccgcaaaaggggcgtccctccccgggacgccccaccttttactccagatcctggatattcattttcttcaggtcttccttccactcccgacggttcttgtagtagagccagatcccgcccagcaccagagtggggacgttgaataccaggaacacaccgcccaccatggccagatccgcaggctggagctggtgatgctcctcctcccggtggtactcctccacgatattcccgtgcccgtccgtgacctgcacggccccgccgccggtgacagcggagaagccgaccaccgacaggcagatcatcaggctcatcgccagggtgatggcgggcaggatcagccccagccactttcccttcctgcacagccagacctgaagggccaccaccagggccaggggcagcagcatagagagcagaacaacagggagcacaaacaatattgtcattatggaaccgctcatcacgtcatctcatcctttcttgtttccttcttataggcggcaatcagcagcttggctgtgtcaaagtccagccgctcatttaccgccagacgcttgatcagggcaatgtaggggtcggccgccctgtcctcccccagcttgatcttctggatcagccggtccagccgcagtctcaccgtgggataggtgacgccgtactgtcccgccacctctttgagggagccggaggacagcacaaattttttgatgaacaccaggtcctcctcctccagaccggccatccactcgggcaccagttccactgccatccttttaccccctttcacaatatttattatatactttaattttattaaagtcaatcctaaatttttattttaataaaattcttttttacttctttctgatgaaagggataccgaaaagccccagccagccgcacaggggggtacactgtatgcccgccataccgggcgggcatgaccggctctgggcatccggccttatggggctaggaacggggaagcggccgccggaaagatcccccgaagcagcttttccttttttccacctcaaaaagacgcggaaagccggaccgcggtctcccgcggtccggctcgtcagatcgttttctcttatcctccggcgttcacagctcctgtgccgaatcacatggtcttgagctgctcctccagcttggccaccagctcggtgagcttcacggcccgctcctgctccgccttgaccacatgctcgggggccttattgacaaagcccggattggccagcttggtgttcagcttctggagctcgtcgctgttctttttcagctccttctccatgcgagccttctccttctccaggtccaccagctccgccagaggcatggagatctgggccgcatgggtgaccacggtgacggagcccgcctccggggcggtgcccggctgggcgaaggtcacctcgctggcataggccagcttcttcaggaagggcacgcccaggacaaagatgtcccgctccccggtggccactgtcaggtgggccttcttgctggggggcacgttcatctcagaccggcgggtgcgcaccccacggatggcatccatgatcagctccatggccttctcctcctccgggaagtccagagcggcgtctgccaccggccagtcggacagcatgaggaagtccccctcgtggggcagggcctgccagatctcctcggtgatgaagggcatgaagggatggagcagcttgagcatctgggtgagcacatggcacagcacctgctgggccctcaccttgctgtcttcgtcctccccctggagacgggtcttggtcagctcgatataccagtcgcagtagtcgtcccagatgaagtcatagatcttctgggccgccacgcccagctcatacctgtccatgttctcggtgatctcacggatggcagtgttcagcttggacaagatccacttgtcctccagctccagcttcccgggcagctggcatgcgtcgatggtcaggttcatcatcaggaagcggctggcgttccagattttgttggcgaagttgcgcatagcctcacaccgctcggtgtagaagcgcatgtcgttgccggggctgttgccggtgaccaggttgaagcgcagggcgtcggcgccgtacttgtcggcgatctccagggggtcgatgccgttgcccaggctcttggacatcttccttcccttgtcgtcccgcaccaggccgtggatgaacacggtgtggaaggggggcttcttggtctgctcgcaggcggagaagatcatccgggccacccagaagaagatgatgtcgtagccggtgaccagcacgtcggtggggtagaagtagtccaggtcctccgtcttttccggccagcccagggtggagaaaggccacagtgcggaggagaaccaggtgtccagcacgtccgggtcccggtggatcttcctgctgccgcacttctcacagcagtccgggtcatcacgggtgaccgtcatgtgtccgcagtcatcgcagtaccagacggggatctggtggccccaccacagctgccgggaaatgcaccagtcgtggacgttctccatccagttcagataggtcttggcaaatcggtcggggacgaagcgggtctccccgtcctccaccactttgatggccgcctcggccaggggcttcatcttcacgaaccactgggcggagatgatgggctccacgtcgttgtggcagcggtagcaggtgcccacgttgtgggagtagtcctcgatcttctccatgagccccagggcctccaggtcggccaccacagccttccgtgcctcatagcggtccatgccctcgtacttgccgccgttggcgttgaccttgccgttgtcatccagcacccggatggtgtccaggttgtggcgcaggcccacctcgaagtcgttggggtcgtgggcgggggtcatcttcacgcagccggtgccgaagtccatctccacgtactcatcggccacgatggggatctcccggtccatcaggggcaggatgcaggtcttgcccaccaggtgcttgtaccgctcgtcgttggggttgaccgccacgccggtgtcgcccatcatggtctccggccgggtggtggccaccaccagatagccggaaccgtcagtcagagggtagcgcatatgccacaggtggccgggcttgtcctgatactccacctccgcgtcagacagggccgtgacacagtgggggcaccagttgatgatgcggctgcccttgtagatgaggcccttctcatacagctcgcagaaggtctcccgcaccgccttggagcagccctcgtccatggtgaaccgggcccggtcccagtcacaggaggcgcccagcttcttctgctgctggacgatgcggccgccgtactggcgtttccaatcccacacccgctccaggaacttctcccggcccaggtcatagcgggtcagcccctccttggtgcgcagctcctcctccaccttgatctgggtggcgatgcccgcgtggtcggtgccggggacccacagggcggcgtagccctgcatccgcttaaagcggatgaggatgtcctggagggtggagtccatggcgtggcccatatgcagctgccctgtcacgttggggggcggcatgacgatggtaaagggcttcttcttagggtcccggtggccccggaagcagccgttcttctcccaggtctcatagatccgggactccacttcctggggctcatagacctttggcagttcttttctcatgtcgttcacgtcctatttccaatgtattttcattccgattggagccctccggccccgggtctcacagctttttcatggtctgtccggtcttacgctccaggaaagcccggaactggtccgcggtcccggtgtgaaagccctgcttgtcgaacaggttgccctgctggcggctgagcatgaggaagaagtagcgcccgtcctcacacagggcctggacggaagagtagtcaaaggactgctccccccgctggttggcgatgacatacccttcatcggtgaaccgggcggtgtgccgggcgacgcccttcatcacgaaccgccccaccagccaggcccggatctcgttgaggaacagggcccagaccagcatcagcgcccccagcagcccatacaggagacccgcccctcctccggaggtccaggccccccgcagcaggatcaggccgcagagcacccccatggcccggagcagcaggctcctccagcgcctgtccaggcggatggccgcccggttcagggctcgcagggcgcgccagtcatagtctgtctcatttacaaattccattgcgctccctccataaaaaacgccctgagccggtcatggctcagggcgaacctgtcatcgtccgcggtaccacctgaattcccctcgcggggcgctcctatcctctgtaacgggaggacccgccgctgtctaccgccccgctggggcctcgaaaacggagctccggggccacttcgccgcttccccatatggccttgcaccgtccggccactctctgccatgggaactgcggttactcctccccctcagcgcctgtgatacaggtggtattatatccagtttctccggtcctgtcaagggacgccgagccgggaggaccggtaaaatttcctgcgcggccgcccgccccggaggctgcgccccaggcaacttacagcatgaagccgttcagcagctcctccagcgcctcccgtgcccgctgaggctccgcccgatcataggcgtccacacggtaccacaccccgcccagcgcgaagtcggcgcggaacatccgggcgccccatttgtcgtaataggggtcttcagggccctgctccaccgtggtcatcactgcggacaggccgttgggggcggtgtgctcctccgtggtgtactgggtatccgaggggagcagatggctctggctgaccggatgatccggcagctccatccgctgggtgtacgccgtcacccacacctccagccggacgccggaatccagatactccgccgtccactccagggcggtggggccttcgctgtcgctgctcagggccgcccgaaaaccggactggagctgttcttgcagataggtgttttccggcagctccaggccaaagtatgcctccgcctcctcccagcttgtcaggtccagccccaccgtagaggcggggtgctccgccgccatgtccagcgcctcctggggcagatcctccagcgccaggaagtctatccctccctccagggtatagccgtcgtagtgcgcctcccccaacgcctcaccgtcatctgagagctcagccgggagcaacaggtcctcaaaaaatttcagggaccggaaccctccgatctggttggccgcccacgccgaccccagcagggccgcacacaagcaggcggcgatcaggccggtccgcaggggccggcgggcgctgtgccgccgggccggaccggcggcctgttctaccaaggccgggtccacaaggcccacagcctccatcatgcgttctcctcggttcacaacattccctcctgttccaaataagctttcagcttcttccgcgtccgaaacaggacgctcttggtcctggacagcgaccagcccaggtgcccggcggtctcctccacggtgtctgcgtaccagtaccgccgcaggaaggcggtacgcggcccctcccccagctctctcaggaaggcggagatggcccgccccagctccgccgcctcggcctgttcctcgggcccctcccggctggggaggcactcagccagctccagagcggccagagagaccgtgtccccctgccgtccccgccgccggcggaggagcagggcccggttgcgcaccaccgcccccagatagccccggaagtgctggggccgggcgggcgggatggcgttccacagctggagccagcagtcccccagacactcctccacgtcccgctcttcccccaggatgcggccggcgatggagcggcaccagcccccgtacttgtcctggagcccggtcagggcctcctcacgccgctgccagaacagctctaccaattcctgatccgtcatggcctcacctcttttccattgtctcttcacttatatagagcatgtcccgccccgacaggtcgcgccgccagggagaaaaatttttccgcctatagaaaaaaacgccggccttccggccggaagcgttcttctgatcacggtgctctttgctcacaaatggcctagcaggggagccgcaaaacaaatttgtcttataccgacatattgacacgcattgacaatctatgttattattgaaattgaccaaaataaattgaaggaagtcggttgttgatggactcccatatgacagcggttgaaagcaataagcgccataaagcggcgggtctattggctgctctggttttggtattgattttagttggctggatctattatgtgttctctcccaaagaactgtccaatgtcctggatttccagccatctgaggccacagactacactgtcacggagatgccaaacgcagtttcatcaaagtcgcgcagcctggacgacaccccgctgatcgaaatgatcgatgcactgaacattcgatactgcggcccctctttcggtgtgcgtcgatttgaaaccggacagcatatatatgagatctggtttttcaaggtaaatgatcagcttgaagagatcggaaatatatccgttttcgaaaacggatatatttatctgggcgagagcaaatatgaggcggtggatcaagaacgatttgatgaacttttggacttccttcgctccgtgacgacagcatcttgatacagataattccattaaaaatgggatatgccttcctggcatatcccatttttatgatcagctgcaagttttttcttccttgtctcagcgccccccccgcttggcggcgttcttctggtaaatgatgttcaggcccttgagcagcaggtccttctccagcttgatctcccggcggcacaggggcacgatgaactgggccatcccccccgtggccaccaccgtggcccggctgcccagctcctcctccacccggtccagcatgccgtccagcatggcggcggtgccgtacatgatgccgctgcgcatgcagtccaccgtgttcttgccgatcacccggcccggccggtccagccggatgccgggcagctgggccgcccgggaggtgagggcgtccagggaggtgcgcacccccgggatgatgcagccccccaggtaggtgctgccccggtccaccacctcgatggtggtggccgtccccaggtccatcaggatcagggggggctcatactccgccagcgcggccacggcgatgacgatgcggtcgctgcccacctgggaggggacgtccatctggatgttcaggccggtcttgatgcccggccccaccaccagggggtgctttcccgtcatcttcaccagtccggtgtagaccgagttgaagaccggcggcaccaccgaggagatgatgcagtcgtccacatcgcagggcttcaccccgaacagggccaggatgttcttgatctccaccccgtactggtcggaggtcttgatgcggtcggtggcgatcctggcctcgaactggatggcgtcgccctggatgcctccgataacgatattggtattgccgatatcaatggcgatcagcatgatctgttcacctcagcggggagggcccccgttttttctctgacccgccagcccccctttgccggagacgcgcccacgggtccttattctgccacattatacccgaccgccggtgggaatacaaggcaggaattaaccgaaactttgcaattcttttcctctcgcgcaaaatatccccctgccctttacaatctgccgcctggtcagctataatgaaaaaaacgacagcggcgccccgcgccgctctatgcaaaggagcgatttgcaatgctcagcggaaaaaccatccttttgggcgtcaccggcggcatcgccgcctataaggccgcggcactggcttccgcgctggtgaagctccacgcctcagtggaggtggtgatgacccggaacgccacccagttcatcacccccctcacttttgaacagctcaccgggaaccggaccatggtggacacctttgaccgcaacttctcccatcaggtggagcacatcgccctggccgaccgcaccgacctggtgatcgtcgcccccgccaccgccaatgtgtgcgccaagctggcccacgggctggccgacgatatgctcaccaccacagtgctggcctgtccctgccccaagctgatcgctccggccatgaacaccaagatgtatgagaacccggtgacccaggacaacctggatctgctgcgccgctatgggtgggaggtcatcgcccccgcctcgggccggctggcctgcggcgctgtggggcccggcaagatgccggagccggacactctggtccagcacatcctccgcgtcctggccctcccccacgacctggcgggccggcgggtcctggtcaccgccggtcccacccaggagtccctggacccggtgcgctacctcaccaaccactccaccggaaaaatgggttacgccatcgccaggatggccatgctccggggagcggaggtcaccctgatctctggtcccaccgccctggagccccctcccttcgtcacagtggtccctgtaatctccgcggaggacatgttccaggcggtgtcccgcacctgccagcaggccgactttatctttaaggccgccgccgtggcggactacaccccggcccagtacagcggggacaagatgaaaaagaaggacggggatctgtccatccctctgtcccgcacccatgacatcctctcctatctgggggagcaccgccgccctggccagttcatctgcggcttctccatggagacccgggacatggtagagaacagccgggccaagctggagaaaaaaaaggtggacatgatctgcgccaacaacctgaaggtggcaggggccggcttcggggtggataccaacgtgctcaccctcatcaccgcggacggtgcggaggaactgcccctcatgtccaaggaggaggccgccggcaccatcctggaccgggccctggccatggccggctgctgagccggaccgctgcaagtcccattttctccccatacgtgcaaaggaggagccgcccacaggaatgggcggctcctcctcttctgttctgatctgcggccgctcccggtccttccaccttccttacatcaggtcccgcgtctccgccccccgcaggctgagcagggcgcacaggagcgagatgccggtcagcaccgcgggaaataccgcgctgtccgccatggtaaagctcccaatgttcgcctgggtcagcaaaaccagcaggaaggaggtcacaatggcagctctggccgagtgcagggccagccccgcgaacaaggcgataaagccctctgtgaccgtcacggcagagcgcaggagcagctgcccatagaaggctccccgggtcatgtcaaagtccagagggaaggcggaggggagaaaccggctccctgccagcacacagccgtagagcagcagcttcgccgccgccagggcgccgaagcagaagatccacaccgccagcatctgggccgccagcagcttctgccgccggacggggtaggagaacacaagagacatggtcccgttttgataggctcccacgatgaaaacagagagcatcaccccggtgaacaccaaaaaacacatactggtcagcagttcgatgggggacgagatccctccatgccccggcaccgcgtcaggcacaccggtctccgggtcgttggcgatccccaggaaagccatggcaaaaatcagcaggccaagcgccgccccaaggagagccgcccatctcacccagttcccgatccggtttttccgccattccagttcgatcagctttcccatgtgctgccctcctccgatgtcagcttcaaaaagtgctcctccagcgtctccgatcttcttccgatctcctccaccgccacatggtgccgggccaggacgccggccacctcctggggggacgcctgccggtcatagatccggatgatgccgcccttcatgacccggaagctgcccaagtgcatcacgtcactgagcaggacactggccctccccgggtcgtccacggtcagatggagataagaggtgccccttccctccagctcacggagagagatctcctcccgcatcctcccccggtggatgatccccacggtgtccgccatggcctccatctctccgaggatgtggctggagaccatcacggtcatctcatattcttctctcatccgcttcagcagatcccgcacctgcttgatgcccgccgggtccaggccgttggtgggctcgtccaggatcagcagctcaggcctgcacagcagggcccgggcgatccccagcctctgcttcatacccagggagtagctccccaccggccggtcggcagcgtcgtccagctccagctgctccagcgcctcttccacgcccttgggacggctgtaccccatatagtcacagtggatctgaagattctcccggcctgtcatgtggggatagaaggtgggaaattcgatgatgctgctcatccgcttcagcaccccgtaggaggtgggcgcgaggggctctccgaacagcagcacgcggcccccggtgggcttccacaggttggtcaccagcttcatcactgtggtctttcccgccccgttagggcccaggaatccgtagatctctcccttccttacatggaggtctacgtcccggaccagctctttttctccaatgatcttggtcaggcggtccgtttgcagaatatacggcatgtgtcttctgcctcctttcaccttcccattgtagtcccaggacttttcagaagatttgcgcaattcttacgaatctctttcgtcttgccatttgggcagtctgaccgtaaagacagtgcggagtccggggacactctccaggtcaatgtctcctcccattcgccgggccagctctctggcgatggacagccccagtccgctcccctctccgctgcttcggctgtcttccaaggtgaccaggcgctggaacacctgctcccccgctcccggtgcgactccctttccgcgatccgccacctccaggaacagggcgtcctccccttccctcagggacacgcccagatatccgccgtcgccgccgtagcgcaccgcgttggagatcaggttgttcaggatgcggcgcagcgcctcccgatcacagcacccccacaccgctccctccgggatctctgcttccacgcggatctcctggcgggtcaggatctggtagaagtccagcacagtctcccgacagacctcacctacgtctaccctggaccgctccagctccatatcccctgcctccagcttggctaaggtgaaaaaacgatccatcagctccatgacctcccccgcccgggcttccaccttttccagcagctcctcccggcactccttccgcagccgcatgatctccaggtaccccagcaccaccgtcatgggggttcggatatcgtgggagatgttggcgagcatacgccggactgcctgctccgtccggcggtactccgcccgccttctctgccgttcctccagcagccggttgatctgggcgatcaaaccggtcagagcctggtcctgggtgaagaccatgacctgctccccgctctccccgtccagtaccctgcccaggacggcggtcatctcctccagactttgtcgcatctgcgcctggagaacgatccgctgatagaggaccgccccgctcagcaccgccacagcggcacacagcagggcggtcagcactgtgtcgtccatcatttctcccccaatttgtagccgatgccccacactgtcgccacatacctcgggtcccgtgggtcgtcctcgatcttgccgcgcagcctgctgatgtggacgctgaccgcgttctcgtctccgcagtaggcatcgttccacacctgggtgtagagctgggccttggtgtacacacgtttaggattcgccatcagcagcttcaggatgtcaaattccttggcggtcagctcgatccgctcccccgccttggtcactgtccgctccttcccatccaggcgcagcgctccggctgtaaggaccatgctcttctccggcggctccgcatactgggtcacccgccggatattggccctgacccgggccagcacctccgctacggagaatggctttgtgatatagtcatctgcccccatacccagccccaaggtcttgtccgcctccgtgtcccgggcagacaggatgatgataggcaccacgctcttctttcggatgtgttccatcacgtccatcccgctgacctgagggatcatcagatccagcagcaccagaccgatcccgccctcgtcgaacagccggcatgcatcccgcccgttggacgcacagaccacttcataggcctccgtccgcagatagtcccccagcatctcctgaatctccctgtcatcctctaccaacagcagcttcattctcgcacctccgctccactcggacagtatctctattgtatcccggtccgggccagaaatcaaggaacgaccggtacgtccggccttttcttatcggaatgggtacagatcagaagtagggcaaagccggatggatctcagggctgccgggctccttcgagaaaaagaaaaatccctgccaaaggcagggatttttccaaaaggagcttgaattactcctcgatggcaatgacaacgccggaacccacggtgcggccgccctcacggatggcgaaacgcaggcccttctcgatggcgatgggggtgatcagctccaccttcatgtccacgttgtcgccgggcatgcacatctcagtgccctcgggcagagtgatgatgccggtcacgtcggtggtacggaagtagaactgaggacggtagttgttgaagaagggggtatgacggccgccctcgtccttggacaggacgtacacctgaccggtgaacttggtgtggggatggatggaaccgggcttggacagaacctggccgcgctcgatgtcggtcttggcgacgccgcgcagcaggcagcccacgttatcgccggcctcgacgtagtccagagtcttacggaacatctccatagaggtgacgacggtcttcttcttctcgtcggtcagaccaacgatctcgacctcctcgccggccttcagctggccgcgctccacacggccggtggcgacggtgccgcggccggagatggtgaacacgtcctcgacgggcatcaggaagggctggtcggccttacggtcgggggtggggatatagtcgtcgacagcgtccatcagctccttgatgcaggcgaagtcaggatcgtccacgccgccctcacaggtcagagcgttcagagcagagcccttgatgatggggatctcgtcgccggggaactcatagccggacagggtctcacggacctccatctccaccagctccagcagctcctcgtcgtccacctgatcgcacttgttcaggaagaccacgatggcaggcacgccgacctgacgggccagcaggatgtgctccttggtctgagccatggggccgtcggtggcggcgatgaccaggatggcgccgtccatctgagcagcgccggtgatcatgttcttgatatagtcggcgtggcccgggcagtcaacgtgagcatagtgacgcttgtcggtctcatactccacgtgggcggtgttgatggtgatgccgcgctcgcgctcctcgggagccttgtcgatgctggagtagtcctcatactgagcctggcccttcagagccagatacttggtgatggcggcggtcagggtggtcttgccgtggtcaacgtggccgatggtgccgatgttgacatggggcttggtgcgctcgaacttctgcttagccattggaatttcctccttatatcatttcattcaaatgatgttttgactgcgatatgatggatatcgcaaacattgtatcgtattactgggaaaaatgcaactgaaatttcccgtaattcctgtgaaaatcagccctcgctgcgtccgcgctcggcgatgatcttgtccgcgatgctcttggggatctccacatagctgtggggctccatggagtactggccgcggccctgggtggaagaacgcaggtcagtggcgtagccgaacatgttggccagaggcaccagggcgtcgatctgctgggcgccgggccgggcctccatgcccaggatctggccgcggcggctgttcaggtcgcccatgacgtcgcccatatactcctcggggacgatgacggagaccttcatgatgggctccagcagcacggcgttggccttgcggcaggcctccttgaaggccatggagccggcgatcttaaaggccatctcagaggagtccacctcgtggaaggagccgtcgtacagggtgaccttcacgtccaccacggggtaaccggccagcacgccggcctgcatggctccctggataccggcatcgaccgccgggatatactccttgggaatggcgccgcccacgatggcgttgacaaactcatagcccttgccggactcgttgggctccacacggatcttgacatgaccgtactggcccttaccgccggactgacgggcgtacttggtgtcctgctccacctgcttcttgatggtctccttgtaggcgacctgaggcgcgcccacgttggcctccaccttgaactcgcgcagcaggcggtctacgatgatctccaggtgcagctcgcccatgccggcgatgatggtctgaccggtctcctcgtcggtgtaggtcttgaaggtggggtcctcctccgccagcttcaccagcgccaggcccatcttctcctggccggccttggtcttgggctcaatggccacgcggatgacgggctcggggaactccatggactccaggatgatggggtgcttgtcgtcgcagagggtgtcgccggtggtggagttcttcaggcccaccacggcggcaatgtcgccggagtagacgcactcgatgtcctcccggtgattggcgtgcatctggaggatgcggccgatgcgctccttctgcttcttagtggagttgagcaccgtggtgccggtgttcagcacgccggaatacacacggatgaaggacagacggcccacgaaggggtcggtggcgatcttgaaggccagagcggagaagggggcgttgtcgtcagcgggacgctcgtcctcctcctcggtgtcggggttcacgcccttgatggcggggatgtccaggggggagggcataaagtccacgatggcgtcaagcagcttctgcacgcccttgttgcggtaagaggtgccgcaggtcacggggactaccaggttctcgatggtccccttgcgcagagcggcacgcagcttctcctgggggatgggcttctcttccagcgccagctccatgatctcgtcgtcgatgtcggcacaggcgtccaccagcttggtgcggtactcctgggccagctccatcatgtcggcggggatctcctccacccgcatgtccttgcccatctcatcatagtagatgtcggcgtccatctccaccaggtcgatgatgcccttgaaggtgtcctccttgccgataggcagctggacaggcaccgcattgcacttcaggcgctcgtggatcatgttgagcacgttgtagaaatcggcgcccatgatgtccatcttattgacgtagatcatgcgggggactttatagttatccgcctggcgccagacagtctcagactgaggctccacgccgcccttggcgcacatgacggtaacagagccgtccagcacgcgcagggagcgctccacctccacggtgaagtccacgtggcctggggtgtcgatgatgttcagacgggtctgggggaactggttcttagtcccctgccagtagcaggtggtggcggcagaggtgatggtgatgccgcgctcctgctcctgagccatccagtccatggtggcggtgccgtcatgggtctcaccgatcttatagttgacgccggtgtagtacaggatgcgctcggtggtggtggtcttgccggcgtcgatgtgggccatgatgccgatgtttctggtattctctaaggtaactttcctaggcatactgtttctccttattaccagcggtagtgagcgaacgccttgttggactcagccatcttgtgggtgtcctcgcgcttcttgacggcgttgccgaggctgttggcggcgtccatgatctcgccggccaggcgctccttcatggtcttctcactgcgggcccgggcataggtggtcagccaccgcagccccagggtctgacggcgctcgggacgcacttcgataggcacctggtaggtggcgccgcccacacggcgggccttgacctccagggagggcatgatgttctcgagagcctgggtatagacctccatggggtccttatcggtcttctccttgatgatatcaaaggcgccgtagaccaccttctgggccacacccttcttgccatccagcatgatgctgttggtaagcttggtaaccaggatggagttatacagcggatcgggcagaacctcccgcttgggtacatttcctcttctgggcactttgcttccctccttcttataaaattagaaatcataggtactcaaactgccttgcagtttgtgtaatgcctgtccgaggtctgcccatattaaaaaatataggaaaacgctcggcaaggcggtttgccttgcgcagaacgcacaatgcaattcaagcctcaaatctcagcagatttgagcggcgggcgggtgatatccgcccatacagcaattttttgctccgcaaaaaattacttcttgccggccttgggccgcttggcgccgtacttggaacgggcctgcatccggccgttgacgccctgggtatccagagagccgcggatgatgtggtaacgcacaccgggcaggtccttgacacggccgccgcggatcatgaccacggagtgctcctgcaggttgtggccgacaccggggatataggcagtgacctcgtatccgttggtcagcttcacacgggcgatcttacgcagtgcggagttgggcttcttgggggtggaagtacgcaccgcggtgcagacacctctcttctggggagcgtgcaggtcggtctgacggctcttcagagtgttcaggccatgctggagggcgggggaagtggacttgtaagtcacctgctcacggcccttccggaccagctgattaaaagtaggcatgtttttcctcctttctcgatttctgcccacattggggcgtaatatatattttaacagaatcaggaagaccttattctgttaaaaccaaaaatatggggtcataccgccgccacgatggcggcgcccacggagatgccgcaggcctctcccagctggcgcatggtgtccacctggatgagggggacgcgctgccgcaccgcctcctgcaccagcggctggaggagcctggggtcggcgtccttggccatgtagacccttttcgcacgtccgtccttcagggcccgccgggtctgtttggctcccacgaccctggaacccgctttcagttcttcgagcatttcggtgcccctcctctcccccgtcgccgggggcgtttcatcgggtaaaagggcagaatgcccctaccaccgcaatttcggattataccatggtctccgcccgccgtcaagagcaaattttcttctgttttgatgcaaaactcaaaattccatcttaatatccctgggccaaagcttcccctggtcgttcctgttccctgcgggaccgggagcggtgtgcatcttgcccgtcccacccgcaggatggcccaaagggctctgcccgcccaaagccttccctttggggggaaggtgccgcggcgtatgccgcgacggatgaggggccttccttctcccgtcccagtcgcagccgtaggatctgtcagagatgttccgccctgcacggggacgggaaggacacgcatcccacagtccgctctgcgtcctcccgcctctatttttctcccccagggaacttttttccccttccgccgtctaacagagtaaaagacgggagagtctcccgccattacggcgctgtcccacacaggccctatcaaaaaacaaggagggatcttatgaaacgcgtctccgccctgctcctcacctgcaccctggggctgtccgctctgtcgggctgctccgcctctgccgccccgcagcctctctctgcccagccggtgacgatctccgaagaggagatgatgcgttatgacctggagacccccgccgtctggtccgccctgtctgaatttgggctggacctgttgaaaactgcccgccaggagggggagggaacactcctatcccccctttccgcggccctggcactatccatggccgccaatggtgctgatggggagaccttggaccagttccgggaggtgctgggggacggtgccagcctggaggccctcaacgtctcctgctctgccctcatgaaactctatggaggactggggggctccacggagtgctccattgccaacagcctgtggaccgacccggagggccgtatgcaagaagactttgtaggcagatgctccggcattttcgacgctcaggtgttccaggaggacctgtccgccccagtcatcgtccccgccctcaacagctgggtgtcagaccataccgcaggcatgatcccccagatcatccagcggcccttcggggaggacgccgccgccctgatggtcaatgccctctacctgaagaacacctgggcggccaaattcgaccccagcgacaccgttacacgggacttcacccgggccgacggagttgcggagcccctggacttcctccagcacttctcccgctctctgacctatctccaaagcggcagcgacgaaggcgtcctcctcccctatgacgacgggcggctggctttcttcgccctcatgccccggcagtcctccggcgtcccggactttgagcgctggctgtcctccctcaccggggaggggctgtccgccctcctctccggcagggaggagaccttcttcctccgcctgtccctgcccaaatttgagcaggagtggtcgggagagctgaaagacgccctggccgctcttggactgacggacgcttttgacccggacctggccgacttctccctgctgggggatgaccccagggggtactacctctcccaggtgatccatgccgccaggatcgaagtcaatgaggagggcaccgaggcggcgtccgccacagtggttgccgcggcatccggcgccgccccgccccaggagggcgtcaccctgatcttcgaccgccccttcctctatggcatcgtggacctgcagaacggagtgcccctgtttctgggcacgtttgaaggcctatgatccgtcagggccctatgtcgagatcacggggcgcggcctgattccaggccgcgcccctcagcttatggaaaaagcctcccagagttcgcacacgcaggcgcaaatccagttctgacctgttttccccggcggcatgtacgccggggaaaacacttctcaggctgcagatgtggggtttgtccgccgcaggcggtcaggccctgcgtgcggcaggctactactttttcgacagcctctctgcgttacacctctcccagcaggcgctggtagtgcttatagagggcggaaaaatgtccctcataccctctggaccagggcttgttcttgccgcagaagtggaggaacaccgtgtggtccatcacccagtccatatccttctccccgtggctgcccagccagtagcggtcatatcgccgggcgtcatagttccacacactgtcgtccacacccaggatccgggtgccgtacaggccgttgaggatgtcctggtccggcaggatcagccgctcctcgtactccctggcgtaggcgaaaatatctgccgggcgcatctcctcccgcatctggggaaggttcatcaacagcacaccggagttgtagtagctctccgcctcatagttggacaacctgatcttgtttacatagtcagacatcccggtcaacccgctgtggctggccgccgccagcaggctgtctcccagctgtgtctcatacaggggccgcaccggccggatcaccaggatatccgggtccagatagagcaccctgtccagttcccggggcagcagctctgccgccagaaggcggtagtacatggcccgggagtagtaccgcaccaccggtgcgtccgtgaacaggccgtccgggacctccagcgggtgcaactggctgtggtgggcccggcacagctgggaaagctcctccacctgtgccccggtcagcccctcttcgatcatatagatatgaaattcctcccctggatcattgagaaacagggagcccagcagcacccgcagcggtcccaggtaattctgatccaatgtcaccagcagatccatacgttcctcctcttccgccgcctccctggcagcgggtacaggaccggcatccggccccgttattttccgtcctttccgttctgatacagccagagggccacgatccccgccatcaccagcgccatcagccactctatcatggtgctccccctccttttcgttctatgatagcccgccgcctcctcttccgtcaaggtgtttttcagttgacataactttcaacagagcttatttccctttcacccgttccgactgccctgcccagccgccgccctggggtgggaaacaaccaaactgacaaaaagccccggcgcgcatgcgccggggctttctcactggacgtgctgttctgttggggaaggagcgatattacaccagcgttccgctgtcctcctgggtgtcggcagcggcctccacctcaggctcctcctcggcgaaaaagccctcctcttccggctcctccaagggctcggcctccactgcgccggcggtctccgtggtgatcagattgccgttctcgtcgatggggtcgtccttgcggtactgtgccagtccggaaccggcggggatcagcttgccgatgatgacattctccttcagccccagcaggtggtccaccttgcccttgatggcggcctcggtgagcaccttggtggtctcctggaaggaggcggcggacaggaaggaatcggtggccagagatgccttggtgatgcccatgagcagacgggtgcaggtgggcaggcgcaggtcctcgcccatctcgttcttttccccggcctccatgcgggtcctcacagccttctcggcgtcccagaactcgatgatgtcgatggtagcgccggagagcaggtcggaatctcccgcgtcctccacccggaccttccgcatcatctggcggatgatgacctcgatgtgcttgtcgttggtgtcaacgccctgctgacggtacactttctggacctcgcggatcagatagttgtgacaggcggacagcccgcggatgcgcagcacctcgtggggggacagggcaccctcggtgagctggtcgcccttggccaccacgtcgccgtccttgacgcgcaggccggcggcatagggcagggcataggtcaccacctcgccgtcgtcggcggtgatggtcacgttgcacataatgttgcgcttggtctcttcaatggacacccggccgctgatctcggccagctgggccatcttcttgggcttacgggcctcgaacagctcctccactcggggcagaccctgagtgatgtcgccgccggccacgccgccggtgtggaaggtacgcatggtcagctgggttccgggctctccgatggactgtgcggcgatgatgcctaccgcctcgccggcgcccacaggctcaccgatggccaggttgatgccgtagcacctggcgcacacgccgctgcgtgcctcacaggtgaggacggagcggatcttggcggagtggatgccgtgggcctccagcaccttggcgtcctcattgcggagcatggtgtcccggctgaacaggagctcgccggtggcggggtccacaatgtcctcggcggggtagcggccgtggaggcgctcggcaaaggtctcgatgacctggccgtactcctcgatctcgctgacctcgatgccgtcccgggtgccgcagtcctcctcccggatgatgacctcctgggacacgtccaccagacggcgggtcaggtaacccgagtcagcggtacgcagggcggtgtcggccatgccctttcgggcgcctcgggaggagatgaagtactccagcacgctgaggccctcacggaagtttgccttgatggggatctcgatggtgcgaccggaggtgtcggccatcaggccgcgcataccggccagctgacggatctgggccatggagccgcgggcgccggagtcggccatcatgaagatggggttgtagcggtccatggactcccgcagggcgtcggtcacgtcgttggtggtcttctcccacgcctgaacggacaggcggtagcgctcgtcgttggtgatcaggccgcggcggtactgccggtcgatcttgatgatctccttctccgtctggccgatgagctcatacttcttggcgggcacagtcatgtccgcaatggccacggtcagggagcccacggtggagtagtggtagcccaggtccttgatggcgtccagcacgccggcggatacagtaaagccgtgcttggtgatgcacttgtcgataatcttgcccagctgcttcttgcccaccacgaagttgatctccgggtcgaacatggtctctggatcggagcggtccacgaagcccaggtcctggggaatggcgtcgttatagatcaggcggcccaccgtggtctccaccagcttgtagcgcatcacgccgtccacctcccggtagaggcggaccttgatgggcgagtggagcgtgacgatcttggcgtcataggccagcagggcctcatccttgtcggcgaagatatggccggtgccctcctcctcccggctgtaggtcaggtagtaggagcccaggatcatatcctgggtcgggatggtgactgggccgccgtcctggggccgcagcaggttgttggcggagagcatcaggatgcgggcctcggtctgggcctcggcggacagggggacgtggacggccatctggtcgccgtcgaagtcggcgttgaaggcggtacacaccaggggatgcagcttgatggcacggccttccaccagcaccggctcgaaggcctggatgcccaggcgatgcagcgtgggcgcgcggttgagcatcaccgggtggtccttgatgacgaactccagggcgtcccacacggcgggagcccccttgtccaccatcttcttggcggatttgatgttgttggccagaccatcctccaccagtttcttcatcacgaaggggcggaacagctcaatggccatctccttgggcaggccgcactggtagatcttcaggctggggccgaccacgataacacttcggccggagtagtccacgcgcttgcccagcaggttctggcggaagcggccctgcttgcccttgagcatgtcggacagggacttgagggcccggttgttggcgccggtgacggcacggccccggcggccgttgtcgatgagggcgtccaccgcctcctggagcatccgcttctcattgcgtacaatgatgtccggggcgttgagctggatcagccgcttgaggcggttgttgcggttgatgacccggcggtacaggtcattcaggtcagaggaggcgaaccggccgccgtccagctggaccatggggcggatctccggggggatgacgggcagcacatcgatgatcatccactcgggcttgttgccagagaggcggaaagcgtccaccacctccaggcgcttgacgatccgggctttcttttgtccggaggcgtccttcagctcgctgcgcagctgctgggagagctgctccaggtcgatctgctggagcagctttttgaccgcctcggcacccatgccggcgtcgaagtcgtcctcatacttctcccgcatgtcccggtactccttctcggagaggatctggttcttggccaggggggagaagccgggatcagtgacgatataggcggcgaaatacagcaccttctccaggatgcgggggctgatgtccagcagcaggcccatccgggaggggatacccttgaagtaccagatgtgggagaccggggcggccagctcgatgtggcccatgcgctcccggcgcaccttggcccgggtgacctccacgccgcagcggtcgcagatcttgcccttgtagcggatcttcttgtacttgccgcagtggcactcccagtccttggtggggccaaagatgcgctcgcagaacaggccgtcccgctccggcttcagggtgcggtagttgatggtctccggctttttgacctcgccgtaagaccactcgcggatctgctcaggggaggcgatgccaatctgaatggcgtcaaactccgtataactcatcgttcaatctcctcccttttctctcaaaaatcctcgtcggagaagtcctctccgtccatggaatcgttcgtgctctctcccacttccaggtcatcgtcgtcgctctcccccttcagggtgtagccggcggcggagaagtcggagtcctccgcggagaaatagaaatcgtcgtcgtcatcgcggcggccgggctggtaggcgtcctcgtcgtcgtccttcagctcgatctcgttgccctgcgcatccagcactttcatgtccaggcacagggactggagctccttgatgagcaccttgaaggattcgggcacgccgggccggggcacgttgtggcccttgacgatggcctcataggtcttgacacggccggtgacgtcgtcggacttcaccgtcagaatctcctggagggtataggcggcgccgtaggcctccagggcccacacctccatctcgccgaagcgctggccgccgaactgggccttgccgcccagaggctgctgagtgaccagagaataggggccggtggagcgggcgtggatcttgtcgtccaccaggtggtgcagcttcaggaagtagacgtagcccacagtgaccgggttgtcgaaccgctcgccggtgcggccgtcgtacagccagttcttgccgtccaccagacgcagctggccggccttctgccactcccggacctggacgttgtccgccatctcctccggagtgagggcccgcagctcgccgccctcctcctggggtgccagatagagctgcttgccgatcaggggctcatcatagcccacctcccgggccaggccggccatcttcaggcactcctggatgtcctgctcgttggcgccgttgaagatgggggtggccaccttccagcccagggccttggcggcgtagcccagatggacctccagcacctgaccgatgttcatacgggagggcacgcccagagggttgagcacgatatccaggggggtgccgtcgggcaggaagggcatatcttcctggggcaggatgcgggagaccacgcccttgttgccgtggcggccggccatcttatcacccacagaaatcttgcgcttctgagcgatgtagacccggaccacctcgttgacgccgggagagagctcgtcacctgcctcccgggtgaagaccttgacatccacgatgatgccgctctctccgtggggcaccttcagggaggtatcccggacctcccgggccttctcgccgaagatggcccggagcaggcgctcctcggcggtcaggtcggtctcgcccttgggggtgaccttgcccaccaggatatcgccggaacgcacctcggcgcccacccggatgatgccccgctcgtccaggtccttcagggcgtcctcgcccacattggggatgtccctggtgatctcctcggggcccagcttggtatcccgggactcggtctcatactcctcgatatggatggaggtgaacacatcctccttcaccatgcgctcgttgagcagcacggcgtcctcgtagttgtagccctcccaggtcatgaagcccatgaggatgttccggcccagggcgatctcgccccggtcggtggaggggccgtcggccagtacgtcctgatagtctacccgctggcctgcattgacaatgggccgctggttgatgcaggtggtgtggttggagcgcagatatttggtcaggcggtactccttggtctcgccgctgtcatatcttacagtgatataccgggcggacaccttggtgaccacgccgggtccctccgccaggatggccacctcggagtcgatgcagttcttatgctcctggccggtagccacgatgggtgcctcgggccggagcaggggcacagcctggcgctgcatgttggcgcccatcagggcgcggttggcgtcgtcattctggaggaaggggatcatggcggtagccacggagaccatcatcttgggggatacgtccacgtagtccacgctgttgcggtccacggaaatgatctcgttgcggtggcggcaggtgatgcgctcgttgacgaagcagccgttctcatccaccggctcgttggcctggccgacggtgtactcatcctccacgtcggcggtcatgtactcgatctcgtcggtgaccctgccggtggccttatccaccttgcggtagggggtctcgatgaagccgaaccggttcacccgggcgtaggaggccagataggagatcaggccgatgttgggaccttcgggggtctcgatggggcacaggcggccgtagtgactgtaatggacgtcgcgcacatcgaaggaggcccggtcacgggacaagccgccgggacccagggcagacagacggcgcttgtgggtcagctcggccagggggttggtctggtccatgaactgggacagagggctggacccgaagaactccttgatggcagcggtgacagggcggatattgatcaggctctggggggtaaccacgtccaagtcctgaatggtcatgcgttcccggatgacccgctccatacggctgaagccgatgcggaactggttctggatcagctcgcccacgcagcgcaggcggcggttgcccaggtggtcaatgtcatcgggggtgcccacgttgtgggccaggccgttgagatagttgatggaggccatgatgtccgccacagtgatgtgcttgggcaccaggtcgtccacgtggtcggccaccgcctccttcagctcctcgccggagtactgctccaggagctggcacagcacggggaaggacaccttctcggtgatgccgcactcctccgggtcaaagtccacgaagttcttcatatccaccatgttgttggcgaacactttcaccagcttgccgtccacatccaggacagcctcattgacccctcggtcctccagctcccgggcccgctccctggtcaggttctccccggcctcggcgatgatctcaccggtacgggggtcggccacgggcatggccagggtgtggccggacaggcggctgcccatagccatcttcttgttgaacttatagcggcccaccgcggacaggtcgtagcggcggggatcaaagaacaggccgttgagcaggctctcagcggagtccaccgtgggaggctcgccgggacgcagcttacggtagatctccagcagggcctcctcatagttcttgcaggtatccttctccagggtggactggatgcgctcgtcctcaccgaacatctcgatgatctcggcgtcggtcttggggccgatggcccggatcaggcaggtgataggcagtttgcggttcttgtcgatgcgcacatagaacacgtcggacaggtcggtctcatactccagccaggctccccgatagggaatgacggtggtggcgaaagtcaggttgtccgccttgtccgcagtgcgggtatagtacatgccgggggaacggacgatctgggagacgatgacccgctcagcgccgttgatgacgaaggtgccggaattggtcatgatggggaaatctcccatgaagatctcctgctccttgatctcctcggtctccttgttgcgcaggcgcacccggaccttgatgggcgcggcgtaggtgcagtcccgggccttgcactcctccacgtcatacttgggcttctcgtccatggagtagtcgatgaaggacagctccagattgccggcgtagtcagtgatggcggctacgtcccgaaagacctcccgcagtcccacgtccaggaaccactggtaggactttttctggatctccagcagattgggcatctccaggatctcctgatagcgggcaaagctctttcgcagggtctttccgtaatatacgtccttgaccgtcatttctaaaaatcaactcactttctttgatttgaaaggggtgaatctactgtttttcggtcctttcccggctctcttccgcattttccccgtcgttgtgcacaaaagcgccaaaccgcgccttttgcgaacacccggctcagtttgaacctttttcaactttcctcttgtcaacttccggggcctatgttatagtttccgtggagcatgggggaccgtgctctttttatgaggatataaaagcattttactttaccatgaaagcctttaacttgtcaaggggctttctgtaaatttttcttttttcttaggaaaagggcaaaatttttttcttgcgcccatcccatttttgttatataattaattggtacttgatcaaatatgccggtgtgatggaattggtagacgtgacggactcaaaatccgttggtggcgacatcgtgtgggttcgagtcccaccaccggcaccaaaccaatataatccgaacttgtttccgataggaaataggttcggattatttgttatatttaaagaaaaatagccaaatagctaatcgcagattaagaccacttttttagaaaagagtaggatttccagatcaaatctggtataatttacaatat

SEQ ID NO: 13547 - DNA, 1310 bp, Unknown
  gut microbiota DNA sequence
tgttcaattagggcatctttctggagcgcatcgcctggcagggcatccaggataccccgcagagccatgtaaatttcatcccgctcctcggtttcgataaagcccattttgttgaaggtctgggtataggctgccaccgcatccagtgcctgggcctgggcatcctcgcccggctcagcggccagcttcatcagctgggaacgagtcttgcggtattgattggctgcctttttcgcagcggcggcagggatatgctccgcaccgtcccagccccggaagggattgtccaggttttgcgccagccactccggtttccggggtttggtgatccgcagatccattcccgtcttgcttttccagagctgttttgccgctttcgccgccgtctccggcaggctggtcatccagaaccagcgaagctccggcatttgttccggggtggggatgtcgtccgcgccgaagccgaacaggtcgaaggtggatatgttcgtcaattcccggaaccctcccacggcggagaagttccccaggtttcccggcgcgccccagagcctcagctccttcagatggggatggacagcagccagcctggtcaaatcaaagtccttcagctcgatgccatgcagcccccgtaggttcggcagttccgtgtgcgggcggtattccccgataaattggagggtcaaaccgctaccatcttcgggggcatggattgcacaggcgtccggccccttgttctggaacaggagctgctccgttccctcacacagccacagttcctgaagtccagtcatgtccagcatcagctttctgatgctggtgccccgcagatcaagtgtcctctgaccgtggttcagcaaagtcacttcattaacaaagggggtttcccgcaagaattccagcagatccgggtgccaccgctcgcagatgagggtggagaggcaaggcagcgcctttagttccagcgccgaatcgaatggttcgtactggtccatcacccgatggctgctgaccttcagcgggatgccgccgatctccgtttgctcgtcgctctccatggcctccttgaaggcccgccgccgttcctccgggatggcctgccattggatctggagatacacatcatagccgtcactccagccgccgtaggagcggcagggctggtcggtgaagggcggaagtgtgcccaccagtttatactggggcgggacctccaacggcacccgcagcaggtggaggtcgcgggaccagtacatgaagtccttgtagagcgggcggagatggggcagttcctccgcagtcagaggggc

SEQ ID NO: 13548 - DNA, 3352 bp, Unknown
  gut microbiota DNA sequence
caagacagaaaaggcgtttgaatcggacgcccacctcaaaaactggctcatccgcgccaccgtcaatcgctgtaagatgctcttccgctcaccgtggcgcaggctggagaacatcgatgactacaccgagacgctgggatttgagcatgagcgggaccaggagctgttcaaaagcgtcatgtccctggacaagaaataccgtgtaccgctgctgctcttttactatgaggggtactccacagcggaagtggcatccatgctccgtatcccggaaaaaacggtcagcaccaggctgttccgggcaagggcaaaactcaaaacgattttggaggaggaatcaccatgacagagcaggaacggtttcagagggcatttgccccactgcatgccccctccgacacactgacggaggtaatgaaaatgacagagcagacgcatagaaagagcggccgcaggaccgcagtcatcgccctcgcggccgcactcctgctggctacgggaagtgcggcttatgcggccgacctggggagcatccagcgcagggtgcagctttggctccacggcgatcagacagacgcagtcatgacagtagagccggggcactatacgctggagtacacagatgaaaacggcgagacacagcagcgcggcggaggcggtgtggcctttgagccggacggcaccgaacggccgctcaccccggaggagctgatggagcatctcaacgcgccggaggtctcctatgaggatgacggctcggtgtggatctactattacggagagaagctggacatcacccatcagttcgacgatgacggcgtttgttatgtacagctcaccaacggggaggagactgtctacctgactgtcaagtatcaaaacggctatgcgatgagttcgcagaaatacctctctccccatgagttcaactgacatgagcagcattgagcagccccgcatggcgtgccatgcggggctgccttctttccgccctcctgccccggagggcctctattctatccccaaaggctgctcctttgccctctgccggccgcagcagaagtcgcactccggctcgtggtcgtcgatgatccccgccgcctggaggtaggagtagatgataacggagcccacgaatctcatcccccttcccttcaggtcccgggaaactgcgtcggacaggggcgacgatgcccggaggagcccgtcccggtggaccacctgctccccccgggtgaagtgccagagatagttggaaaagctgccgaactcctcctggatcgttaaaaagatcctagcgttgttcaccgccgcagcgatcttccgccggttgcggacgatggaggggtcggcagccagggcgtccatcttctcctgggtgtaggcggccactttgcggcagtcgaaaccgtcaaaggctgtccgaaagctctcccgcttgttcaggatacactcccaggacagccccgcctgaaaggattccagcaccagcagctcaaagagatagccgtcatcatagtggggcctcccccactcctcgtcgtggtagcggatatagcgggggtttttcaagttgacccacctgcatcgccttctctccatgggcccctcccttacggcgcggtgctgttgtcggggacgaagaagcggtccgtctccaccccctcgtggtccaaaagccagagcttcttgtcgattcccccggcgtatccggtaaggctgccgtccgcccccaccacccggtggcaggggatgaggatagagatggggttgtggcccaccgcgcccccgaccgcctgggctgacatgctggcccggcccagtcgggcagccacggtccgggccagtgcgccataggtggtcacgctcccataggggatgcggcacagctcctcccagactgtcctccgaaattccccgccgccggggtccagcttcagctcaccggaatccggccgctcccccgcaaagtagcgggacagccaatccccggcctggagcagcacggggtggccctccatgggctccgccggctccttcagggaacccagaaagtatttctgtccctccagccagaggccggccagtgcgtcccccctggccgccaggagcagagcccccagaggggactgatagtgggtggtatagaccatcgctgcaccgcctttccaagtcttccagagcgatcccagggagtttcccatgatccgcccgttttttacaggtcatcctattataccacagaatcacaaaaatgacggccattttctgccctaggcaggatttttctctgtctgtccccggtaggcgtcgcctacgcccgaagcattatcttctccgccgaggcggagagcgaggctatggcccagctgcccagtaaggaaattgccgcgctcgcgcgggtcactgcgccggttgccccgcatatgaagcagggatttgaggacatcccggtgagagagaaatggccatcaacaccgccaatatcataggagcgctttacagagggctgcgtcctgacccgccccctgttccccagcaggttcatctgctgtgagccgctcccggacaaggtggactgtgtggtgttctgctccaagaaccgccggcccatcctcccctgtctccccccggcagtgctaaatttgtcagctttgtgtatagattttgttaagaaattattgtaaaatacaactgttgatagatacaacaataaaaagggaggcagggaccatgcaggaccggagcgagattttccgccgcatcaagcagcagtattttcgagagcagctggcgcctctgggattccagcccatggacggcatgatactctaccttctgtggggcggaaactgcctgcgtcaggaggacatcgcggcccagaccgccctggataagggggcagtagcccggagtgtggcccgtctggaggagcgtggcttagtggagcgctgggtgagtgaccagtgccggcgtgagaagcaggtctcccttaccccggctggggaggagcgcgctggggccgtccagaagatcctggagagctggaacgacatctgctgccgggggttctcctccgaggaacggacactgtataacagctttttgtcccggatcatcgaaaatgtcatgcaatacaaaagaggagaggaaggggacgatggttaaaaatctgacagagggcaagcctctcaacctgctgtttttctttgccctgcctatggtggcgggcaatctgttccagcagctgtacaacatggtggacaccgctgtagtgggcaagttcgtgggggaggacgcggtggcagcggtaggctcctccttccccatcgtgtttttgtcggtggcggtg

SEQ ID NO: 13549 - DNA, 6222 bp, Unknown
  gut microbiota DNA sequence
ctttctgctggcttcttgcggattccgttcctgttctgtataattaagatatattgagttttggggagatcctatgtgtgatatcattgaggtgacagacctggacgcgccggagctggacgtgtacgcccggctgacacaggctcagctgcgcagccggcgggagccggaaaaaggtatttttattgcggaaagccctaaggtgatcggacatgccctggacgcgggctgcgtccccctctccctgctgatggagcgcaggcagctggagggacagggccggggcctcgtagagcggtgcggccaggtgccggtctacaccggggaccgtgcggttctggccgggctgaccggctatgagctgacccggggcatcctgtgcgccatgcgccggcccaggctcccctctgtggaggagctgtgcgcccgggccagccgggtggcggtgctggagggcatcgtggaccccaccaatgtgggggctatcttccgctccgccgctgccctgcatatggacgccgtgctggtgacccccacctgctgtgaccccctcagccgccgggcggtgcgggtcagcatgggcaccctgttccagatcccctggacttttctgggcaccgacgcatcccagtggccccagccggggctggagaggctgaaggagctgggcttccagactgcggccatggccctggacagcaccgccctcagcatcgaggacccccggctccgcgcggcggagaagctggccatcctcctggggacagagggggacggcctggccccccggaccatcgcccagtgcgacttcaccgtgtgcatccccatggcccggggggtggactccctgaacgtggcggcggccagtgctgttgccttctgggagctccgggcccggtagcgtcaccattgtatggaaaaacggcggaccgtctggcggtccgccgttttccggcttgtgaaaaaagcctcgcagagttcgcgcccgcaggcgcgaatccagttttgatctgttttccccggcgacacatgcgtcggggaaaacacttctcaggctgcaagtgtgggggttgcccgccgcaggcggtcaaaccctgcgcgcggcagactgctgttttctcgcaaacgtggcacagccacttttgcgacagtctcaaaaacggcggaccgtctggcggtccgccgtttttcttgtttgattcagatcacgcccgccagcaccagggcaaacaccacgaaggtggccagcagggacagggcaaacagcacgaatccggcgttgatccgcttctcctgggtgctctgggaggagggcgccactccggctctccgcatggcggacaccaccggggggtagagcagcagggtggccgccatgttcatcccgcccttggccagattgaaggggaggaacagagtgggcagcagcccggccacgtcggcccgggaatagccggtcatatacaggggggtgatgaggtagttccacagcagcatcaccgcgaccaggcacgccacgccgcaggccaggcccaggaccgcgcccttcttggaatggaccttcttgtagatgaagcaggcggtgcaggagaaggcgcaggtggccaggacattcatgataaagccaatggggccggtgtggctgatggtgagcatctcgatgaaggccaccaggatggagatgatggcggcggcgaaggggccgaaggtgaagccgccgatgcagaccaccacgtccttgaagtcgaagtccaaaaacatgacgctgggcatcagcttggacaggagcatcacgatgtaggcgatgccggtgagcatggcgatgctcaccatggtcttggtgtccatcttgggacgggagggggtctggactgcggaaggtgcggacataaaaaacactcctttttgttttggtacacctgaaagcccatgtcttccaggtgtaaaacaataaaggaggtgcgcaggaccgcgcgcctgacggcgcacgacattgttttgacacacatcttcttccatccggactttaaccgttggtcccggagtttcaccgggtcagcgggcgcattgctgcgcccggtcgcggactgtaccgccagtgggggatctcaccccgccctgaagacattcgattcagttgtccgaactcattatagtgcatccccgcgccaaatgcaacaaaaattttgttcccccctcccacagcccctgcggttccgcgcctccttccatatgccgcttccttttttcgtcgaaatctgatatagtagtcaggtcacagccccggccctgccggtctggggccgcatgggagggatcttatgaccggcatcggtacgctcgtcaatgtgtgcgccattattttaggcggattcctgggcctgctttttaaaggcggcctgaagcagcactaccaggatgcggtcctgcgatgtctgggcctgtgcaccctgttcatcggcgcggccggcggtttgtccggcctgctgtccgtctccggcacccgcctggagtccggcggctccctggggatgatcctctctctggtgctgggcaccctggtgggggagcgcttgaacttggagggccggctggggcagttgggcgagtggctcaaggccagggcctcccgcggggaggacagccgctttgtggagggcttcgtcactgcctccctggtggtgtgtgtaggcgccatggctatcgtgggttcccttcaggacgcactggaccacgatccctccacccttttcacaaaggccatcctggacttcatgattatcatggtattctcctccacctacggcaggggggccatcttttctgcccttcccgtaggggtccttcaggggagcgtcaccctctttgccggccttctcgcacccctgctcagcggcaccgttatcgacagtctctcctttatcggctccctgctcatcttctgcgtgggcgtcaacctggctttcggggatcggttccgcgtggccaatatgctccccgcgctgattttcggcggcatctgggcttccctcatgggatgatttaaaaaatggcatgccggcagactgacccaaacacttgttcagtaacatgagtcattcaaatcgctccaatcttgtactgaatgggctgaatcgctcttatcatgccccatacgaatgacttcttttgctcatgtatgctgataagaatatttttctggatatcgctaaaaaattttgaacaccaccgatacagccggtggtgttcattttgggcggcttccagagccatccctacaaaaaattcggacggccgtggcatcggaccctgcgtggtttgtaccattcccgctccctgtccgtgatattgctttaaattttctttccgtccagctacatggaccattctctacctgtaccgatatataatgcataacagagtcctgtctgtgtacaagtatgtactcgaacaggcacaccggaaaagtcttttttgtacattaccttagtttgaaaagtatggtaaattggatgcagaacatgtcgaagcgggtgattttatggatgatttttggatcgagcgggccccggagaaactttccagcatcagccggaccatccgcttggatgcggcgctctttgagcgcatcatggaggagagcgaaaaaacaggggtctcattcaataagatagtcaaccagtgcattacatatgcgttccagcactaccgggaaccgaaggtaacaccggatggaagataagacgatcctgtattctgtgcgctatccttcggcccaggaggagggggagcgcatcaaggtccggggggacaggcaggcggcagaggcgaagctgaccgaatttctgcgccgcatgagggaggagcggacttatgagcccatcccggggcgggaggagaagggcaggcgcttcgccgccctggcccgggagctgtcccagatctatgaggtgggcctggacatcctgcggacgcccgactccatcgaggccgccctgcacctgtactgttccgcctattccagggatatgacgcggcggctggcagagctgttggggatgtgtgatgtctgtgccgccagccggcccagaacggagcccagtgatcttaccctctccctcatgctgtacacccaccgctgttatgtgtccggccggctgatcagcggctgaccggcccaagggataaaaaggcgcgccgcccggctgggcggcgcgcctgtctgcgtccatcaatagttcatctgcttgcggcgggacaggttcatggtcccgtcctgcatgtggtccaggtcatccagggacttgcccgtgccgtaggccacacaggagatggcgtcgtcggccacatgggtctcgatgccggtgtgggactccaccagcttgtcgaagccccagatcagggagccgccgccagtcatcacgatgccgttggtggagatgtcggccaccagctcggggggcgtgcgctccagcacgccgtggatggcctccaggatgcgggtggagggctcctcaaaggcctcgatcatctcgctggaggagacggtgaacacccggggcaggccggtcatcagacagcggcccttgatgtccatggtgacctcctccgggcgggggaagacacagccgatggtcatcttcagctcctcagcagtacgctcaccgatgagcacattgtgcttgcggcgtatgtacttgatgacagcctcgtcgaacttgtcgccggcgatcttgatggaggcggactccaccacgccggacagggagatgaccgcgatgtcggcggtgccgccgccgatgtccaccaccatgtggccgtcgggcttggcgatgtcgatgcccgcgccgatggcggcggccacaggctcctcgatcaggtagacccggcgggcgcccgcctggatgcccgcatcaatgacggcgcgctcctccacctccgtgatgccggaggggacgcagatgaccacacggggcttgaacaggcggaaggaggtgaccttcttgatgaactccttcaacatccgctccgtcatatcatagtcggagatgacgccctcccgcagggggcgcatggcgatgatgttgccgggggtgcggcccagcatggcgttggcctcggcccccaccttcagcagcttgccggtgttcttgtccatggccaccacagagggctcgcggagaaccacgccttttcccttgacatataccagaacggaggcggtacccaggtcgataccgatgtccttgctaaaccaattcatatcattacctcattcgatttatcttgtattccaggagagtataaccctgaaactggaaaatatgcaaaaacaggagctttcttatttattataacggcaagcaggctgcatttcaactgttatttcgcagtttttcgcggcttttccggcctgtccttccgggcttgtgccagggtgacgcacaccacctccgccgctccggcggtgaggagggtcctggcacattcggacagggtggagccggtggtgaccacgtcgtcggccagcaggacccggaggccggcggcggcatcaggcgctctgtacacccccagcacgttggcccggcgctggcccgcctcctccagaccggactggggcggggtatcccgggtcttgctcagcagggggagggcggggacctccagcacccgggcggcctcctccgccagcaggcgggcctggtcatagccccgctgccgcaggcgcctggcgctgagaggggcccaggtcacgcagtcgaaccgtccgtccagctggtcccggacgcactgggccatgagctggccgaaggggcgggcatagctccggctgccggagaatttgtagcggtggacggcctcccgcaccgggccccggtaggccaggggagagacgcacaccccgaaaaattcccccgtgcgccgggcggagtccccctccagccaaggcagcgtccgctgacaatccgggcagagcagggcgtgccgctccgtcaggagccggcggcagaagggacagcggggcgggaacaggaggtcgaggagcgcgctgcccatcttcacggaacatcagccctttccggtccggcctgccgcgggggcacggcagccggggatcatgccctcatgataatacgcatcggaaaaagacgcaagtgaaagcggagaaaaatgacagagaccggggaaaaagcaagggtgcccgccccgtgggcgggc

SEQ ID NO: 13550 - DNA, 29503 bp, Unknown
  gut microbiota DNA sequence
gacggtacaaaatcactatatttagaaagaaggcgggccagcagacactggcccgccttctttggtcaacaaagtttacataatcatgttgacataaagtattgacggaaatgacgaattttcacaaatccttcaaaaccccttgcggaaacgggcgccgagcggtatattaaggataaattcagattcggtagggggatccaagggttccccgcttctatttttttatcccgcctcataggctgacactgaggtgagcgccatggggagacagggaaagatcatgctggatgtgccgtctgggacgttggccgcgatggcggtgctgggtatggcgttcctgctggggggcggcgcgggctgcctgctgggcggcatggtgaatggtgcgggcggcagcgccctgtccgactatctccagacctatctgacgctggcccaggacgggactgagggagccccgggcttttgggcggtgctgtgggagcagatgcgttttcccctggcggccctgctgatgggattcacggcgttgggggtgatcggactgccagtgctgtttgccgtgcggggctttttattttctttttccgtggcctgcttctgccgcttgttcggcggggcggggctgatcccggcgctgttcttgttcgggctgccggcgctgctgtgggcgccagccctcttcgtgctgggggcccaggggatgctgggggcctacggccttctgcggcgggtgacgggggacagccgctatcccctcagctatgacaccgcctacggggtccgctgcgcgctgtgcggcggggcagtcatgctgtgtgtgatcttggagctgagcatcgttccggtgctggtgggggcttcggcccgctttgtgctgtgacttgcgggagggcccgcaatctggaatcagggagttttgtgtgtgtcgaatctgttggaggactatgagagctatctgacaactgaaaagaaggcctcggccaacacggtgagctcctatctgcgggacgtgcatcagtttgcccaggagatggaggaacgggacgtcccgctcgacgaggtgctgccccgggacgtggaggactatatccggggcctgacccggcggggcaaatccgctgccacggtgacccggtccgtggcatccatcaagtccttctacaactgcctgctgtcaaggggactggtggagagcaacccagcccgaaacgtgactgcggcgaaggtggagcgcaagctgccccagatcctcaccagccgggaggtggagctctttctggagcagccagactgcagtgacctgaaggggtaccgggaccgggccatgctggagctgctctacgccacgggtatccgggtgtcggagctgatcgagctggacgtggacgacctgaacctctacgccggggtgcttcactgtgccagcaaggggaaggagcgggtcatccccctttaccccgccgccatccgggcgctggaggagtatctgcgcaacgtccgcccgcagctcatcaacgagccggacgagacggcgctgttcgtcaacatgagcggggaccggatgagccgccagggcttctggaagctgatcaaatactaccaggagaaggccggcatccagaaggacatcacgccccacaccctgcgccactccttcgccgcccacctgctggagaacggggcggacctgcgctccatccaggagatgatggggcacgcggacatctcctccactcagatctactcccggatgctgaaccacaagctgaaggacgtctatcagaaggcccaccccagagcatgagccaggccggatgcagttcgtcctggtttttgcttgacagggcggctccgctgtgctacactgcatgggaatctagaagaaatggaggcgggaaaatgcgcaatgccgcttgctgaaccgcatgatggaagagagaggggcctgaaaagccccggttctgtcatgcctgagcaagagggtgttgtcttcccgctccggctgttcgtatggagctgccccaggggggcggctgtggatcgtctgccaaagccgtgagaaggtgcgccttcttgcggcttttttcatatgccccgccggcggcggggcggaaagggaggcagaacagtgtctttgatccaaatcgaacatttgtattttacctatgacggcggcagcgagccggtctttgaggacctggacctacagctggaaacagactggaagctggggctggtgggccgaaacggcagggggaagaccaccctgctgcgccttctggagggcgggctggagtaccgggggcagatccgcacggggggcctggcctgccgccggttcccctgcgccgtccgggagacggaggtcccggtgtcccaggtgctgcgggatatctcaccggaggcagaggagtggcagctggtccgggagctgtccctgctggggctggatgaggaggtgctggagcgcaccttctccaccctgagcggaggggagcagacccgggtgctcctgtccgccctgtttctggacgaggggagctggcccatgctggacgagcccaccgaccacctggacgaggaggggcgggagttgcttgcccaatatctcagccacagccgccggggcttcctgcttgtctcccacgaccgggcgtttctggaccggtgcgtggaccatgtgctggccctgaaccggacggggccggagctggtgaagggaaatttctccgtgtggtaccaggagaagcaggaccgggaccggcgggagcaggcccagaaccagcagctgaagggggagatccgccgactggagcaggcggcccgccggacctctgcctggtccgaccaggtggaaaagaccaaatacgccagtaaaaattccggactgcgccccgaccggggctatgtgggccacaagtcggccaagatgatgaagagggccaagagcctggagagccggcaggagtctgccatccaggagaaggcggctctgctccacgacgtggagcgggccgagcccctgaagctggccccccgggcgttccacagcgcccgcctgctggagctggaccgcgtctccatcgactacggggacgggcctgtgtgcggcgaggtcagcttctccctgagccagggggagcggctgtgcctggaggggaggaatgggagcggcaagaccagcctgctccggctgatcctgggggaggaagtgccccacacggggaccgtgcggcgggcctctggcctggagatctcctatgtctcccaaaaggtggaccatctgcagggagcccttcgggacttcccggcggaggaggggatagacgccacccagtttatgaccatcctgcgcaaactggacttccccagggcggcctttgagggagaaatgggtgcgtacagcgcgggccagaagaagaaggtcctgctggcggccagcctgtgccgcagcgcccacctgtatgtctgggatgagccgctgaattttgtggacctgttctcccgtatccagatggaggagctgctgctggagtaccggcccaccctgctgttcgtggagcacgacgaggcgttccgggagcgggtggccacccggcgggtgtccctgtctgagcgcgggctggaaaaaacagacaaagatatgaaataagatttgcagtttttccatcccctgcacgtatagaggcaggagaagacttggcagccacgggagaggggggagtcagggcaaaaggcaggaatgagtgtggaaagactgttgcctcagatgctgatgtccacagccgccatcctggttgggatcctgctggtcctcatggggctgctgcgcatagggaggtcgatcaagttccaccatcaccatcggatctccctccagcgttgtcgtgaccatcgacagaggccagctggaggaattcttccgccgatccggctgggcccggtggccgatatctgcataacagaggggctccccggcagtgccggggagccctgacgatgtgggaaagtgggcggtccaaagcgcagttagcgggaggcccgggggcaggcggtgccggtgcctgactccgcagaggctggagcggccgcctggacatagacggcgtcgtccctggggtccagcacggccagtgcagacagggcctcatcgtcggccctggtgagggacaggaccagacggttgttctcctcgtccagggcgcaggaggacagcaccgccttcactgagggctgggcacagatctgctcctggagcttggtgagggaggcgagggagtagcgggccctggcaaaggacaccccgcccccggcccagtcccggacctgactgcgcagggcctgtgtgtcgcagccctggaccagcaggaccaccacatctcccgcgctgtccagatagccgccgccgtaccagtccgggtaggtgccgttgccgtattcccgttggatctcccgagtcaggcgctccaggagcagggcgccctctcctgtgtcggcatcggaagaggtctctccctccgcactgggcagctgctgggcagggtagccgccgtcctgggcggaggcgggaagccggctgaggtcgtactgctccccctcctctgtggggagggtgtccggtccaagtccgctctcgctgatgatgaggccggggcagggggctgcctcctgggtactggcgtcctgttcctgccccgccgcttcctccaccgtcacatagctgtggaggggcggagagaggagggcgtgtcccagcggcagggcggccgccagaaggaggcaggcggccagcacccagcaccggcaccggtggcggtggacggggcgacggacaggctgggagagcccctcctccagcgcggcccgggccgccgggctggggatgagctgttccttcatctgagaaaagatggggtcattcatgaaaatagtctcctttcagcagctcccgcaggtgctcccgcccccgggacaagcgcatccgcaccgcgcctgggcggagggagaggagccgcgcgatctcctgggtggacagttcttcaaagtagaacaggtagagggggaccctcagcccgtctggcagagaggagagggcggaccagagcccggtctgttccggggtctggaactgcaccggcgcatccgcacgctccgagagggggaccacacgcctccgccagggggaggaggtcacccggcggctgaaattgagggtggtgcgcaggagccaggccctgcggtgctcctcctcctggaaatgttttccgcactggaaataggccagaaatacctcctgaaacacgtcgtccgcatccgcccggctgccggtccgagccagtgcgaagccgtacaccattttttcgtaccgctccaggatggaggcgaatccctcctccgggctcagcggttgctctgccatatcacgacctcccttcgcataatactccattttgcagggggaaatgtcacggtggaagcagacttttttctccagaacccccatcctattttccgttgtaccatacacccgctgggaaagcaagggagtgcctcttcccatgcctcccgacagccgcccagtgtgccgcggtatcgaaagagagagggaaagtgaaaacagtctttccatttggagaaaaacatgatacacttacttggtatgtatggaagcgggaggggcccatgatcgttttaggcatcgacccgggcgtggccaccatcggattcggggtggtgcgtgcggagcgtcagaaaaacacgctggtccaatacggcgtcatcaccaccccgccgggcatccccctgtccagccgcctgctccagatctctgacgacatggaagagctcattcgcaccttccacccggacgagatggcggtggaggagctgttcttcaccaaaaacatcaccaccggcatcgcggtggcccacggccggggggtcatcctcctctcggcggagcggctgggggtccccgtctttgagtacacccccatgcaggtgaagcaggctgtggcgggctacggcggggcggacaagcggcaggtcatgctgatgacccagcgcctgctgaacatgaagcaggttccccggcccgacgacgccgccgatgccctggccctggccatctgccacggccgtgccgccaccagcctcctgaacaccgaacgggtctttgaccccatgaaatacgacacacgatgaaagaacagcggatcaggagataggaccagggggacttgactcccggaaaggatgggacccatgcctgtcatcgtaaagcagcccgccccagacctgccctacagtctccacgacgcctatattctggaggtgcggctggagggggataccctgcggctggtcacccagtacggctatgtggagacaacagagcccttcgaccaggtgcagggggatgtggagatcactggggtagactgggacagctcccacgcctatgtaatggagtaccgcggcgtcctctgcggaaaccgagggccctttaccggccggaaaatggcggtggaggattttttgaagacataccctcaggggacgctggacattatggacgagacctacgggtaccgccaggtgaagctggacggctttctcaacctgaccggccgctgcctggagtttcggctggagctctattatagcggagaattccgatacctgctcaaggagccggcgcctggagcggctgtctgaactgtgtccggcggagctggataccgcatccatatctcataactcctatctgatctaatgtgaggtcctatcttatgttttattatctcagtggaaccgtgacccatatcgagccctatctggctgtcatcgactgcggcggagtgggctatgcctgccgcaccaccagctataccctgtccgccctgaagaagggggataagggaaaactctttacacatctcaacgtgcgggaggatgccatggagctctacggcttcgccacccaggaggagctgaacctgttccagcagctcatttctgtctccggcgtgggccccaaggccgccctgtccatcctgtcggccagcaccccggccaaccttgctctgtctatcattaccggggatgagaaggccctcacctgcgcccagggcatcggcaagaagatcgcccagcgggtcatcctggagctgaaagacaagctggccaagggccagaccatcaacggggcgggggagacctatggaggcaccggggtcaccgtcatcccggagaacaagctgtctgaggcctccgccgccttggcggtgctgggttactcccagggggagatcaacctggcgctcaaggggatcgacttggacgcccttaccctggaagaggtcattaagcaggcgctgaagaagatgatgaaggggtaaagttccgactggaggtgcagggaaatggccaagtttgaatgtgtgtttccaagcggctattcctttaacgatatcctgcagtatttccatacccatctcaccaaaaaccacggggaatgcacggggagcagcgactattcctctgaacgtgcccgggttgccgtccgggtgtatgagcgatacagtctgatgggggacaactatctaagcctgacgctcaccctggtcaatgacggcggggataccttcgcatccgctatctccgccgccgggcgtgggggcggtctggggatctccattcactggggtgaggacaaatttttggagattttttccgacggcgcaaacatgttccaggggatgagggtcctggagaaaggctgaagggtgccgggacgcggcggccaaatatgaaaaacacttccgcggcgattttagacaggttttgaccctgatcgaccgggcagtgatggacggcggctcctctgccgcgctggagaccgcagtggcatgagctgcggcgaggcccgccccgtgggcggccgggacaggaggggacgatgaagaagctggagcggaacataccgggggtctacgactttgatgaggtgctggactatctgcaccgggggatcatggacatgcggaccaatgtggtgtggaacctgatccaaatgcaggatacggtgaccctggcgggccagtgggacggccggcgggatggcgtccgctgcgccttccgggtgtatgagaaatatatttatactcattcaagaggttaccgccttaccctgaccatgatgctggcgggccgggacggcaggctgtttttgtccgttgtcccgggcgcgtcccaccagtatgctgatatagccggagtggatgagacgatggactggatcaggacactggcggaccagctcaccggctgagtccgccgaaggaggggacacgatggcaacgctggagcgtgagttttccgcccgctggggcgtggacgaggtcttccgttatttccgggacgggatcctggcggggagccagtctgttaccgacgggggagggagtgtctatgagacagagggggcgcgctttattgtccgggtgtttgagcggttcagcctgacagaccgggatctggtctcgctgagcctgctgctggccgacctgggggacggcaggattcggctcacagggatcaccgccggctgcggcaggctggagaagctatggacctatggcgaggaggcctttttgaagaagctgacgaagctggcagacgggttcgatgccgcccacccacaacagtaggggagagggcgccctctgctggcggtcgctggcaccttgctagaggtcatcagcgccgagccgcctaagatctttttcgacggcttcggcatggagctcccggagggggcctatcgggaatatcccaaatgcgacctgctgtacgacctgccctgaccggtggggcgcgtgcggccgggatcggaccaatgaacaggaagtggacctatggccattgatttttccaacacagaatttgaagcggaggggctggaggagcccctggtgaccacctccctcacccgggaggacgagggagagtactccctgcggcccaagaccctgcgggagtacatcggccaggagaaggccaagggcaacctggaggtgttcattcaggcggccaagatgcgccatgagcccctggaccatgtgctgctccacggcccccctggactgggcaagactaccctcagcggcatcatcgccaatgagatgggggtgaacgtgcgcatcacctccggcccagccatcgagaaggcgggggacctggccgccctgcttaccaacctgaacgagaacgacatcctgttcgtggacgagatccaccgcctgaaccgggcggtggaggaggtgctctaccctgccatggaggactacgccatcgacatcatcatcggcaaggggccctcagctaactccatccgcctggacctgcccaggttcaccctcatcggggccactacccgggccggacagctgtccgcccccctgcgggaccgattcggtgtgacgctgcggctggagctttacagtccggaggagctggccctgatcgtcacccgttccgccggcatcctggaggtgcccatcgagccggagggagccatggagatcgcacgccgctcccgggggacgccccgcatcgccaaccggatgctccgccgggtgcgggacttcgcccaggtgcgggctgggggcgtcatcacccggaacgtggcagaccaggcccttaccgccctggagatcgaccatctggggctggacgccatcgatcaccggatgcttcgcagcattatggaaaactaccggggcggcccggtggggctggagaccctggccgccaccatcaacgaggaggcggtcaccctggaggacgtgtatgagccctacctgatgcagctgggcttcctcaccaggaccccccggggccgctgcgtcactcccaaggcctatcagcacctggggctgccgatgcccgggggcgcgggcggcggcggactggaccagctgagcttctaaatcggaaaggggagaggaccatgggcttttggcttttctgcaccgcctcgtccctgctgatcccgctggtgatgctgttttttggccggcgttttttgacaaagccgcccaagagcatcaactccctctacggttaccgcaccgcacgatccatgaaaaatcagcagacctgggactttgcccaccgggtgtgcgggaagctctggtctcgggcgggggctgtcatgcttcctctgagcctgctggctatgctgcctgccttggggcggggcacagaggagaccgggatgtggtgtattccggtgacaggggtgcagctggcagtgcttgtgggcagtatgttccctgtggagcgggcattgaaggaaaactttgatcaattcggaagaaagaggtaatcatatatgggtaaactattcggaactgacggcatccggggcgtggtcaacgccggtctggatgcggacttggcttataaggtgggcctggcggcggcggaggtgctggccaagggaaaacagccgggggagaagcccctggtcaccatcggcaaggatacccgcatctccggcgacctgctgaagggctccctcatcgcggggctgtgcaccgcgggggccgacgtgctggacctgggcaccctgcccacccccggcgtggcctgggtgacggtggacgagggggcggatgcgggcatcgtcatctccgccagtcacaaccccttcgagcacaatggcatcaagatcttcaacggccagggcttcaagctgtccgacgagctggaggagaagatcgaggagatcgtcctcttcggccacaacgacgtgccccgaaagacccacggggagatcggcaaagtgagttatgtggcccccaaggcgtcagaggactacatcgaccacctggagtccaccatcgactccactctgggcggcctgcgcatcctggtggactgtgccaatggtgccgcctccgccaccgccgcccgcctgttcgaccgcttctccaagctgcgcaccgacgtcatcaacgccgacccggacggggtcaacatcaacgaaaagtgcggttccacccacatggacgccttggccgccatggtaagggctgggggctatgacatcggtatcgcctttgacggcgacgcagaccgctgcctggcagtggatgagcggggggagctgatcgacggcgaccagatcatggcggcatgcggtctggacatgaagcggaaggggaagctgccaggaaacgcggtggtggccaccgtcatgtccaatctggggctgcatctgttcgccaaagagcacgggatggacctggagtgcacctccgtgggcgaccgcaacgtgctggagcgtatgctggagaagggctatgccattggaggagagcagtcgggacacatgatcttcctggagcacgccaccaccggagacgggcagctcaccgccctccaggtgctcgctctgctgaaggagagcgggaaacgggcctctgaggtgttcgggatctgccagcggtatccccaggtgctcatcaacatcccggtcgccgacaacgacaggaaaaaggccgttatggccagccaggccctggccgatgccgtggctgcggaggaggagaagctggccggcgagggccgggtgctggtgcgcccctcgggcactgaggccctgatgcgggtcatggtggaggccagggatcaggatacggcccaggcggcggcgcagcggctggcggaccagatcgccgccctgtgacagaaaactggaaggtgtggaagttcgtgacaaggggcagttttcctgctctgtgagactttcacaaatcgattcaaaatttttcttgacaaatccgtcggttttgtttattatgtataggagccatagtatatggatttggtgcagtcccaaacacagtcttactcggatgaatcgctctgccgtctggccgcctccggcgacccgctggcagagaccgagctggtcggccgctatacacgtctggtgcgagtgtgtgcccgcccgctttttctggcaggcggcgacagcgaggatctgatccaggaggggatgctgggactgctggccgccatccgcggcttccagagcggcaaggagacctccttccgcacctatgcggagatttgtgtccgcagcaggctctatgccgccgtccgggcggcgcagcgggataaacactttcccctgaaccatagcgtctcattcgaaacccctctttttgacggaaccagcgcacacctgttctccagcgaagagagcccggaagatgttgtcatcggcagggaagaactgagagagcgcctagacgctctgaagggacaattatccggtttcgaggcagaaatcctatcctactatctgggcggtctctcctgcgccgagatcgccagccaggtcgggcgctccactaagtcagtggacaacgccgttcagcggatcaggcgaaaggtggcgcggcaactttcttccggcgatctcagcaagagctgatcgcaaatattacaccacccatgaaaaatggggaacgagtcaaagagagggaaaaccatgtacgaagacaagatcctggtatgcaaagagtgcggcaatgagttcacctttaccgccggtgagcaggagttctacgcggagcgcggcttccagaacgagccccagcgctgcaaggcctgccgtgacgcccgcaagaacgcggcccgtggcccccgtgagtacttcactgccacctgcgctgcctgcggcggcgaggctcgggtcccctttgagcccaagtccgaccgtcctgtttactgcagcgagtgcttcgccaagatgcgcgagcagcagggctgatttcatccaggaaaaaagggcgcccaccgggcgccctttttctcttttccaccctttctcagatgttgaggagcgggaaggaggtcccggggctgagaagataggggggccgtcctttttctcagggaaagagaccgcatctggagaaagcagaaaacataaaattctccattgcaaaaatcctgtcgataggatatactattcttattccaaagaaaacggaggaattctgctatgaccatcaccaaggacaccatcatcggtgatatcctcaacattgcgcctcagaccgcccccctctttatggggatcggcatgcactgcctgggctgccctgcctcccgcggggagaccgtggagcaggcctgcatggtccacggggtggacgtggatgatctgctccagcaggtcaacgccatgatcgccgccgaaaactgagctgctgaaaaagcggggcggagcaatccgccccgcttttttattcattaaacaacaggggaggaaacagcgttgaaatatacggttttgatggggagcccccggaagaacggcaataccgccgctctgctgcgggcatttatggaggagaaccgggacatggggatcgagcaggatatgatctggctctatgaccggaccattttgccctgcctgtcctgcaagcagtgccagagcacgccctgggggaccttcggctgtccccaggaggacgacatgcaggccatctttgattccgtccagaccagtgaagtacttatccttgcaagccctatctattcctggtactgcactccgcctatgaaggcggtgatggaccggctgatctatgcacccaacaagtattatgggccagagggccgtcagcccgccctttggaagctgaagcaggtggctgctatcgccagctgcggctatcaccccgaccggggcgcggacctgtgggacgaggggctgaagcgctggtgcaagcacggggagatggactatctcggcatgctgtgccgccgggacttcgggccccaggagccctttatgaatgaagagcgggatgaggcagcccgggactttgcccacgccctttacctgacggtcagcctgtccctgtgactatggagaagcgggcggagctgagcccccggctccagggggtggcggagatgatcccggagggggcccggctggctgatgtggggacggatcacgcctatcttccggcatggctgctccagaacggacgcatccccagcgccatcgcctcagatgtgcgggaggggcccctctccagggcccgggctaccgcccgggcctgcggctgctttgagcggatgtccttccgcctgtgcgacggcctctctgggatcgctccggaggaggtggacgctctggtcatcgccgggatgggtggggagactatcgctaatatcttggaagcggcgccatgggtaaaggaaaaagactttccaattattctccagcccatgagcactcaggcggagctgcggggctggctgtggcgcaatggatttctatgcctacgggagaaaacagttttcgaaggggaaaccctttacagcataattttggcgagacagggaggcgcggtccccatgacgcccgccgaggagtgggcggggcgccagtacccggggatggaggacccgctccggggcctgctgctggaccacttgctggggcgggtgaggcgcgccctggatgggatggcccgctcccgggcgccggcggaggcgcgccgcagggagctggagcaggtcctggagggcctgatggagatgcggaaggagtgggatgcatggcagcagcgataatagacgtctaccgggctctggaccagtgggcccccttcgacacccagatggactttgacaatgcgggcttcctggtgggccggggagagcgggaggtccggagggtcctggtgtctctggacatcacggaggcggtggcggcggaggccggccgctggggggcggagctgatcgtctcccaccacccggtgatttttcatccggtgaaggccctcaccgaccagaccagcaccgggcggaccctgctcctgctggcggaacagggtatcggggcggtgtgtgcccacaccaatctggacgctgcccaggggggcgtcaatgactgtctggcccgggccctggagctggacggtgtggaactgctctgccgggacgggactgacggacaggggcggccctacggcatcggccgggttgggacggcccctcaggccggctgttccgccgctgaatttgccgcctttatcaaggaaaagctctccgcctgcagcgtccgtttcgtggagacgggccggccggtgcgccgggtggcggtggggggcggcgcctgcgcctccatgctctccgacgccatggcggcggggtgtgacactttcgtcactgccgacgtgaagtacgaccaatacctggaagcaaaggccctgggcatcaatctgatggacgcgggccattttgccacagaggatgtagtgtgcccagcgctggtgcagttcctctcccggcacttcccgaaggtggaggtccggcggacggagacccaccgggaggcttatgattcggtgtgagaaaggcgaaaaacagggaaattctacttgcattttgaaaaatgctgtggtataatcctttggtctgataacgggcggtcctctgcggcgccccagcgacagcggggcagacggccggcaagaacgcctatataaacaggaggaatcattatggatctcatgcaggcttttactcagaagcacctgaaggctgagccccccgtcgtagaggtgggcgacaccgtgcgggtgcacatcaaggtcaaggaaggcaaccgcgagcgtatccaggtctttgagggcaccgtcatcgccaagaagcacggcggtctggaggagaccttcaccgtccgccgcgtgtcctacggcgtcggtgtggagaaggtgttccccgtccacgctccctccattgagaagatcgagaccgtccgccacggtaaggtccgccgcgccaagctgtactacctgcgcgaccgcgtgggcaagtccgccaagatcaaggaagccctgtaatccaacataaaaagggagcggtactggtaccgctccctttttataccatggcggcggggagagcggagcacgccctccgccgtagggaaggagaagacgagagttgaatattcagtggtatccgggacatatgaccaagacccgacggcagatcgaggcggacctgaagcatgtggacatcgtggcggagatcatcgacgcccgcatccccatctccagccggaacccggacatcgatgccatctgcgccgataagccccggctgatcgtgctgaaccgggcagatcaggccgacccggcccagaaccgggcctggggcgagtatttccggaaaaaaggatatgcggtgctggagactgatgccaagaccggccggggtgtaaaccagttctcctctgtgacccaggaagtgctgaaggagcagatctcaaaatggcgggagaagggccaggtaggccgtccggtgcgggccatggtggtgggagtccccaacgtgggaaagtccacctttatcaataaggtggcccggaagaagtcggctaaggcgggggaccgccccggcgttacccggggcaagcagtgggtcaacgtggacagtgccctggatctgctggacacaccgggcatcctgtggccgaaatttgaggacccgcacactggcatggtacttgcctttacaggcgctgtcaaagacgaaatcatggatgtggagaccctgggctgtcatctaatggcctatcttggtgagcactatccccaggtcctgacccagagttacaagctgccggaagttcctgcccgccaggaggaggaaaacgacatcgcctacggctaccggctgctggaggccggcgcggcaaagcgggggatgcgcatctccggcggcgagttggacacggagcggatggctcgggtcctgctggatgaatacagggccgggaagctgggacgctttacactagagacaccagaaggaacgtctatatgagcagcctggagaaaaggaaggaaggcatgggaccgggagagtatgagcagaaagcagtggaggccggctttgtccgggtctgcggctgtgacgaggcgggggccggacctctggccggaccggtgtacgccgcggcggtgatcctggcccagggcgcggacatccccggcctgaatgactccaaaaagctgacagaaaaaaaacgggaggcgctctttccactcatccaacagagtgcgctggcctggtcggtagcccgggtggaggctgaggagatcgaccggaccgatatcctcagcgcgcggatcagggccatgcagctggccatagaagggctctccctccgcccggattttgccctgatcgacggaaaccgggaccacgggcgctctgccgccattaccgttccccactggtgtgtggtgaaaggggacagcatctcgccctccatcgccgccgcctccattctggccaaggtgagccgggaccgcttcatgctggagatggcggagcgctatccacaatacgggttcgagcggcacaaggggtacgggacccgactgcactatgagatgctgcgccggtacggccccagtcccatccaccgccgcacctttttaaaagacctgtgagcgggggagagagcaggctgctgggccggtggggagaggctctggcggcggaggagctgcgccggcgcgggtgccgcctggtggaggccggctggcgctgccggtttggcgaggtggacctgatcgcggaggaggggcctttcctctgctttgtggaggtcaagctgcggaaggacggacgggtggcccaggcgcgggagttcgtggaccggaggaagcaggagaagctgcggaccacggcccagctctatctggcggagcatcccacgcagctccagcccaggttcgacgtagtggagatatacgcgccccaggggctggcgacccgggccccggagatctatgtcatccctgacgctttttgacgtccctctgccccaatctggaaaacgggcggggcccggggggagaaaatcggggagaaggggagactgcccctcttttttgcgacaaacgcttgaccggagagaaaagaactggcataataaagcattggattgaatagcggggcgaggcggccctgtggtcttgatgatcgagatttgactggataaaggactgagagaaatgcagtacatcagcacacgagataagaacaccacatatctggcatctcaggccatcgcccaagggctggccccggacggcggcctgatgaccccggcgtatctgcccaagctgccgggcaagtccctgtctgacctgaaggagatgtcctatcagcagcgggcggtctatatcatgaagctgtttctggacgagttctccgtcaaggagctgacggagttcgctgcggcggcctatgggccggaaaaattcgacactcccgccgtggccccggtccgcgccctggatgacggaaccttctgcttggagctgtggcacggccccacctgtgctttcaaggacatggcccttcagatgctgccccatctgctcacagcctctctggtgaagacggaggaggagaagacggtgtgcatcctggtggctacctccggggacactgggaagggggcgctggagggcttccgggatgtggaccgcacccgcatcctggtcttctaccccaaggacggcgtctccgccatccaggagcttcagatggtcacccaggaggggaagaatgtgggcgtctgctcggtcttcggcaactttgacgatgcccagaccggagtcaagaagctcttttccgacgaggcgctccgccaggagctggcccgccgggggtacttcctctcctccgccaactccatcaactggggccgggtgctgccccagatcgtttattatatctccgcctactgcgacctgctgcgggacgagaagatccagccagaccaggcggtgaacgtctgcgtccccacaggaaacttcggcaacatcctggccgcctactatgccagggagatgggggtcccgatcgacaggctgatctgcgcctccaacagcaacaatgtgctcactgacttcatccgcaccggccgctatgaccgcaaccgcgccttccacaacaccatctctccctccatggacatcctgatctccagcaacctggagcggctcctgctggcgctgacccaggatgacgagcaggtgaaggactacatggcccagctgtccgccaccgggacctatcaggtcagcgaccgggtgagggagaagttgcagaagcggttcgctggctatttctgcgacgacgcggagaccaaggccgtgatcggccgcatttatcagaagtacgactacctcatcgacccccacaccgccgtggccttcgacgccctggagcagtaccggagcgagacgggggaccagaccccctgcatcgtggtctccaccgccagtcccttcaagttctgcgacagcgtcctcagcgccctgggcgaggaggagaagcagaacgggctggagctgctggacgagctgagcgaaaagaccgggatgcccgcccccaagccgctggcatccctccgggacaaggagatccgcttcacacagaccgtggaaaaggaccacatggtggacgcggtgctggggatgctggagtaagcgatggccctgtacgccattggagatacccacctgtccctcagctccgacaagcccatggatgtcttcggcggcggatggacgggatatgtggagaagctgcgggagggactgtccgtgctggagcccggggacaccgtggtgctctgcggggatctgtcctggggcatgagcctggaggaggcgaggcaggactttgctttcctcagttccttcccggggcggaagctgcttttgaaggggaaccatgactactggtggaccaccgcagccaaaatggaccgctttttccaggaaaatgggttttcttcctttcaactgctccacaacaacagccatctctatggagacatcgccctgtgcggcacccggggctggttctacgaggaggaacgaggcgggcacagtgccaagatcttcaaccgggagctgatccggctggaggcctccctgaaggcggcgggggagcgggagaaatactgcttcctgcactatccgcccctgtatcaggggtaccggtgccaggagatcctggatctgctccatcggtacggcgtgacccgctgcttttacgggcacctccacggggggagccaccgcctggcagcggtgggagagcaggacggcatccagttccggctggtctccgcggattatctgcggtttcaaccagaaaaaatctgcgattgagcggaaaaatcaaaaatatctctggtcaaacagagccacatctgttagaatatccaggcgaaagtaaaaaggcgggctgttcccaagaggggaccaggcgcctacaggaggaaaaggaaacatgaaggtcaccaacgtggaaaagaaagaaaagagcaccgtggagctgaccatccaggtggaagctcaggagtttgaagacgccgttcagaaggcttatctgaagaaccgcgcccatatcagcgtgcccggcttccggaagggcaaggccccccgcaagatcattgaggggatgtacggctccggcgtgttttatgaggatgccatcaatatcgtctaccccggcgcctatgaggaagctgtgaaggagcagggcctggacgatgtgggttacccccagacagaggtagtggaggtcggcaaggagggctttactttcaaggccctggtctccgtccgtcccgaggtgaagctgggccagtacaagggcctcaccgcccccaaggctgagccggccgtcactgacgaggacattgagaacgagctcaagccctacatcacccgcgccacccgcctggtcagcgtggaccgggaagcccagaacggggacaccgccgtcatcgactttgagggctttgacaacggcgtggccttcgaaggcggtaagggagaaaattacagcctggagctgggctctggttcctttgtccccggcttcgaggagcagatcgtgggattgaaagccggcgacgagaaggagctgaacatcacctttcccgaggactatgtgcctgacctggccggaaaggccgtgatcttcaaggtgaaggtcaaggaggtcaaggagcaccaggcccccgtggtggacgacgagtttgccaaggacgtgtctgagttcgagacgctggaggagttcaagaagagcctgggcgacaagctgctggacagcaaaaccaagtccgcccagcaggagtatgagaacgctgttatcgagcagctggtgggcaacatggaggctgacatccccgatgccatggtggaggtccagctggacaagctgatggaggacttctccatgcgcctgtccaaccagggcatgaagatggaggactacctggcgatgatgggcgccacccccgagtccatgcgcgcctctgcccgccccaccgctcagcgtcaggtggaggtggacctggctctcaccgctgtggccgacgccgagagcatcaccatctccgacgaggagctggaggaagagctgaagaagatcgccggggagtacaagctggagctggatgaggtgaagagagccatccccgtggaggatatgaagcgggatctgcgcctgagaaaggcctctgagctggtgatggccgaggccaaggtgggggaggcccccaagaaggaagaggccgaggagaagcccaagaagactacccgcaagaagaaggctgagagcgccgagggcgaggaggccgccgccgaggagaagcccaagaagaccacccgcaagaagaaggccgaggaggctgaggagcccaaggcggagtaatttccaaggtttttgtgtccggaggtatgcgctccgggcgggcgggcatactattggtatcactgcccaagtcaaaggagatcattctatgagtttagttccttatgtagtcgagcagaccaaccggggggagcgttcctacgacatcttctcccgactgctcaatgaccggatcatcatgctctccgaggaggtcaacgacaccaccgcctctctggtggtggcccagctgctgtatctggaggcccaggacccggacaaggagatccagttctacatcaacagccccggcggatcggtgacagccggcatggccatctatgacaccatgcagtatatcaagtgcgacgtgtccaccatctgcatcggactggccgcctccatgggggcgttcctgctgtcctccgggaccaagggcaagcggctggccctgcccaacgccgagatcatgatccaccagccttctgccgggacccaggggcagatcaccgacatggcgatccacctgaagcggctggaagtggtcaagaagcggatgaaccgcatcctgtcggagaacaccggtaaggccatcgaggtggtcaccgccgactgtgagcgggacaacttcatgaccgcccaggaggccgtggagtacggcctgatcgacaaggtcatcgaacaccgttaaaggaaacaggggagtgggaacaggcttctgttcccactccgattcctatctgaacgcacaacaatgaggtgcattatggcaagaaacgacgaaaaaaagtccatccgctgctccttctgcggcaagcatcaggaccaggtccggcggctgatcgccggcccgggcgcctatatctgcaacgagtgtgtccagctgtgcatgggcatcctcagcgacgatgtggacctgccagaggagggctacgctggagagatccctgacgagatccctacgccccgggagatccatcaggttctggaccagtatatcatcggccaggatcaggccaaggtggccctgtcagtggcggtgtacaaccactacaagcgcatctattttggaggcgcggaggatgtggagctccagaagagcaacatcctgctcatgggccccaccggctgcggcaagaccctgtttgcccagaccctggcccgaatcctgaaggtgcccttcgccattgccgacgccaccactctgaccgaggcgggctatgtgggcgacgacgtggagaacatcctgcttcgtctggtgcaggccgccgactacgacgtggagctggcggagcggggcatcatctatatcgacgagatggataagatcgcccggaagagcgagaacacctccattacccgggacgtttccggtgagggcgtgcagcaggccctgctgaagatcctggagggcacggtggccaatgttccgccccagggcggacggaagcacccccaccaggagttcatccaggtggacaccaagaacatcctgttcatctgcggcggcgccttcgacggcatcgacaagatcatcgagaaccgcctggataagcgcagcatgggcttcggcgcccagcttcagagcaagaaggagcgcaatgtgggcgaattcctgaaggagatccagccccaggacctgctgaaattcggcatcatcccggagctggtgggccgcctgcccgtcatcactaccctccagtcactggaccgggagcagatgatccagatcctcactgagcccaaaaacgccttggtgaagcagtatcagaagctgctggactatgacgaggtggtgctggagttcagccgggaggccctggaggcggtggccgaccgggcggtggcccggggcatcggagcccggggcctgcgggccgtgctggaggaggtcatgaccaagatcatgtacagcgtcccctctgaccccgccatcgtcaaggtgacaatcacggcttcctgcgtgacggacggggccgacccggagatcgtccgggacccggagcgccgccagcgcccccgtctgggcaaggcgtccctgcgggccgagcgcggcggtgcggtgggtaccaacgccggctgaatcccatttgaatgaccattgctgcaatgtcccgcggaagcctatcctgtgcgggcctcccgggacttgctttttattcccagagaggaagtgacgaacatggaccatgatcctgttgccagcatccagactctcccggctatcgcgctgcgggggctgactgtgtttcccaatgtactgatccacttcgacgtgggccgcgcggcctccatcaaggcgatggaggccgccatggctgccggagagccggtgttcctggtgggccagaaggacatgacggtggagcgccccgaacgggatgacctgtacacagtgggcaccctgtccaacgtgcggcagatcctccgcatgcccggggacaacgtgcgtgtgatggtggagggcatctcccgggcccgcctgagggacgtgacccagagggagccctatttgatggcggagatagaagccatcccagaggagaaggcgggcagggcctcggccaagaccgaggccctgatgcgcagcacctatgagatgttccaaaattacacggagctcgcccccaagatctcaccggacctgctcatcaatgtgctggccagcgacgacccaggctatatcgcggactatatcgcccagaacatcgccatgcgcaacagtgacaagcaggccatcctggaggagctccggccggtgcgccgcctggagcgtatgtaccgcctgctgtgccgggaggtggaggtgctctcccttgacatggagatccagagccgggcccgggagcagatgtcggagaaccagcgggactactatctccgggagcagatgaaggccatccaggccgagctgggtgagagcgagaacggggacagcgagacggcggactatcggaaaaagattgctgaggcccagctgccggagccggtgcgggagaagctggagaaggaactcaaccgcctgtccaagcagcccttcggctcctcagaggccaccgtgatccgcaactatctggatgtatgcctggagctgccctggggcaaaaagacccgggaacgggtcagcgtggaggctgcccgcaaggtgctggacaaggaccactatgggctggagaaggtgaaggagcgcatcctggagttcctggccgtcaagcagctggcccctgagctgaaggggcaggtgatctgcctggtgggcccgcctggtgtgggaaagacctccattgccatgtccatggcccgggccatgaatcgtaagctggcccgcatctctctgggcggcatcagcgacgaggcggagatccggggccaccgcaagacctatgtgggggccatgccgggccgtatcatcaacgccatcagccagtctgggagcagcaaccccctgctcctgctggacgagatcgacaagctgggctatgaccaccggggtgacccggcctcggccctgctggaggtgctggacggagagcagaacgcctccttccgggaccacttcctggaggtgcccttcgacctgtccgatgtgctgttcgtgaccactgccaataccacagagaccatcccacggcccctgctggaccggatggaggtcatcgagctgaacagctataccgacgaggagaaacttcagatcgctaagcgccacctactgcccaaggagctcaagcgccacgggctggcccggacccagctgaaggtgtctgatggcgccatccgggagatggtggcctcttacacccgggagtcgggagtgcgggtgctggagcgcaagatggccaccctgtgccggaaggccgccatgaagctggtggagggaacatgcaagtctgtttccattacagagcgggacctggaggaatatttgggagcgccccgcttccacccggagcgggaggcactcgcccagcgggtgggcgtagttaatggcctggcctggacctctgtgggcggtgagctgctggaggtggaggtcaacgtggtccccggcagcggcaaggtggagctcaccggcaacctgggcgacgtgatgaaggagtcggcccacgcagccctcagctttatccgcagccgggcctctcagctgggcattgacggagatttctacaagaacagggacatccatgtccacttccccgaaggggcggtcccaaaggacggcccttccgcgggcatcgccatcaccacggctatggtgtccgctttgacagatacaccggtaaagccgggactggccatgaccggcgaagtaacgctgagaggccgggtgctggccatcggcggactgcgggaaaaaactatggcggccctgcgcaacggcatcaagaccgtgatcgttccggcggagaatgagaaggacctggaggagatcgaccagacggtccgcgccgccctccattttatcctggtggagcaggtggaccaggtgctggccgcagcgctgtctctgtccagcaccgcctgtgagcgggacaccgagcaggggggacccttccctgcaggaaagggcaggacgtccatcggcctgaagcagtaagagggggagagaccatggccatcaacttccaacaggcggagttcatccgctccgccaccgcccccaaggattttcccagagacgggctcccccaggtggcttttgccggacgctccaatgtggggaagtcctcggttattaaccggttgctggggcgcaaaaactttgcccgggtgggggcggccccgggcaagaccgtccatatcaactactttctgatcgataagaccttttatctggtggatctgcccggctatggctacgccaaggtctccaaggcagagcgggaccggtggggccgcctgatggaggactacttcgcggaccgggagctgatgaccttcggcgccatgatcgtggacgcccgtcacaagcccaccgccgatgactgcaccatggcccagtggtaccgggacgccggctgcccttttgtggttgtggccaacaagctggataagctgaaaaaaagagagatcgagtccaatcttctgacaattcgagagacactggagctggatgattctgtaaagttgattcccttttctgctgagaagggcgaaggaaaacaggagcttctggatttgatcctatcgaaattgtgaggaagcacggcccctctgcgcccatgcgggcacggaggggccgtgtgcgtgttcccgctgcggcggggagaaaagggagggaaacggagatgttggagcggagctatcagacgagacaggggaccatccgatactgggtgagcgcgcccggccctcgcgggaccgcgctggtctttctgcctggcctgacggcggatcaccggctgttccagatgcagttctccttttttgcatcccgccggcccctgctggtgtgggacgcaccgggccacggggcctcccgcccatttgccctggatttctccctgatggaacaggcagagtggctccacgggatcttggttcgggagaggatgggagggcctgtattgatcggtcagtccatgggggggtatctggcgcagtgctttatggagcgattccccggacaggcccggggatttatctccattgattccgccccgcttcaacggaggtatgtcacggcggcagagctctgggcactgcggcgctgcgagctgctctaccgctgttacccctggagcatactgcggaaagccggagccagagggtgcgcagagacagcccagggtcagacgctgatgaaggagatgatggactgttacagcaaaagggaattcagcgccctggcggggcacgggtttcgggctctggcggaggcgatggcggctgatctgccgtacaaagtggactgtcccgcccttctgctgtgcggggaacgggaccgggcgggcctgacgagacggtataaccgccgctggtcggaagagaccggcatccccctggtgtggctccagagcgcggggcacaactccaacacggacgtgccggatcaggtcaactccatcatccagggcttcctcagggaacatggactttgaaacgtgtcggcggggacctggcccggtggggaggcagaggccgcccttctacggcagatcccagtcatcctcaaaaggaaaaatcttaccctccggctttctgtaaatttccgaagttctctctacgcagcattttttgaaaaagagctgcctgattcgccgtcttgtattttctttgagaatctggtatgataaacaagtatttatttgtccatgggtgccccatggacagggaagggaggccgccatggggtcgctgaatggttttctggagcatatggactggtttcaactgtttctgctgctgatcggtgcggtggcctgcctgttctgcatcaccttccacgagctggcccacgggttcgcggcctaccagctgggggaccccaccgccaaggtgaacggccgtctgacgctgaacccgatctctcatatcgactggatcggcctgatgctgctgctcactgtgcgggtgggctgggccaagccggtgccagtggatatgcggaacttccgccacccaaagcgggacatggccatcaccgccctggccggccctgcggccaacttccttctggccacggctgccctgggggtggcctccctgatctatcacttcgcgcctcaggggacggtggcggcctatgccatctatttcttcctgtatatggcggtgctcagtgtagggctggggatctttaacctggtccctatcccaccgctggacggttccaagatcctgttcgccctgctgcccgaccggatctactaccaatacctgcgctatgagcggttttttatcctggctgtggtgctgctggcctggatgggggtgttcagcgtgcccctgagcttctgcatggagggcatcgtccgcggcctgtgcgcggtgaccgccttcccgttccagctggcgcagtactatttcttctgagaggcattggggggaacgctttggacagtccgatctaccacctggaaggggtggtcaaggccaaaacagaggacatggaggactttgtcggccccctggacctgatccttcacctgctgagcaaaaacaagatggagatcaaggacattcagatctctctgatcctggaccagtatttggcctggatggccgcccgcaaggagatggacctggaggtagccagcgagtttgtcaccatggcctcccagctggtctatatcaagacgaggatgctcctctccatccacgacgaggaggccctgagcgagatggagcagctcattgccagcctggaggagcaccagcgcaatgagaactatctgaaaatcaaggagatcacccccctgctggaccggcggtacagctatgggagagacttcatcaccaaagtgccggagaccattcagccggacaggacctaccgctatgtccacgacagggaggacctgaaaaaggctattctgtctgtcttgtccagggcggaccaccagctgccgcccccagtggcggcttttcaaggcatcgtggggcgggagccataccctgtgtcggaaaaggcaggggagatcatccgccggct

SEQ ID NO: 13551 - DNA, 1038 bp, Unknown
  gut microbiota DNA sequence
gtgacggatgaactgcttgccccctttgccggacataaaagcatggccaacttcggcgtggaggacggtgcgctcactgacgcctgtttccccgttttttccgctatgcccaagttgcgctatctgctgctggacggcaatgccgccatcctcggcagcggtctgcccgccctgcaaggctgcaagctggaccttatcactctcaaccgcaccgggctggatgatgccggattactccaggcggcctccattcccaagctctcccacattcagatcgaccataccgccgttacctatgagggcctgctggccatcgccggcaacagccgcatagagccggtggcccatgtgcaattcaccaaggagcagatggaacacttctcccagctccagcgggaaaaggccaaaaagcccacccagctggacgaacaggcggcggaatgccgcagggtgctgtccgctttctttgccgagatgacagaatgggaacagtacatggagcaggccgggtttgaagatgccgaggctgtgccccgactgctggcaatctgggaaaagtatgtgagcgaaaagccccgcccgggctatcggcctctgggcctctcatacagtgcccagggtacatacagcggggaagaattccttgacgcggagcagatcaccaagaacaagctctacatctacaccagggagaaaaacaccggctttgaccgccgcttcctcatgaagcgtgtgaacgagggctggaggatcgacgcgatgcaggagcggctggacggctggcagcgaacaggactataaggtatcagagggaggcgcaggtatgcgagcacaagccggagaggtctatacagtctacaaccaatatctgaaacgctacaccgcctgccaggtggcctatatcgcgccgccggacacggtgagcaaagaatcttgggcggtggtcctctctctggattgggtgggcgacgcccctctgactgcggaggaactgccccatctccgcccgctctacaaggacttcatgtactggtcccg

SEQ ID NO: 13552 - DNA, 1243 bp, Unknown
  gut microbiota DNA sequence
catcttctccatggcctccgagctactcaccgctccggcggcctacaccgccatggcccacgccgtcactccctacggcgacggctttgcctgccgccggatcgccgacgccattgagtggaaattcggcctgcgggccgaacggccggaggaattccggacataacgcggtccgggcggagaggagggaacaggcgtggagcgcagaaagcggaatctgctggtggtactcatcggcatcgtcatcgtggtggccatggtgtccagctttggactgggcctctttgcaccggacacggcgaagatcgtgctgcccacgccggaggtctcccagcagccggggggagagcctggcgagcagagcggtctggtgctggtggacgtgacgccggagacggtgcagagcgtcatccgggataccctctcccgcccggaccgctacactcgcgcggtcacgatcgaggacttctggggcgagggagagagcggaaccacccatgcggacgtgtgggtggacggcggctggacccagacggaggcagccctgccaggcgggacggtacgttactccatcgtgggcgacgggcagttctggctgtggtatggaggcgaccgcacggccctttccggtccggcggacgggcactcggcggatctggagggccagcgcatccccacctatgaggacgtactggagctggagcaggatgccattgccgccgccggatatgaggagaagggcggcctggcctgcatttatgtggagacaggcgaggacgcgctgggctatgtggagaagtactgggtctccgtggacagcggcctgttggtgtgcgccgagcagtggaaaggggaggagctgacctaccggatgacctcctatgcggtgtcgacggaccgtaccctcttcggactcacggagtttgcgttgccggacggcacagtgctgcatacggtagaggaataacgggcggccggcagggggccggccgcccgttattccagccccagcagcaggagcagccccagggtgatgaccagttccatgtcgtccccctccagaaagaggaacaggaggatgagcaggagcaggacatcgccggtgtcgaggccgtccagcttgaggccccgaagcagcttgcccagtcctgaggcgggcttggcggattccggcgcctcggcgtccggctccggcgggggcgcgtcgggagggacggtctgggtgggaggggcatcctcctcc

SEQ ID NO: 13553 - DNA, 83731 bp, Unknown
  gut microbiota DNA sequence
gctgatgtacaaaaagagcggcgggggatacggggtcaccaccggcaccctgctggactccagcatggcttacgccgggtcctccagctcctcctcggggacacagactacccaggagacagaggagcctgagacagaacagccaggggagacggacgccgggacggagacccccggcaccacgcccccggagggcacggagaccggaaccggggaacccggcagcaccggctcggagactggggagcccggcacgcaagggccggagggagagactcccgatacggatgaccccggggctgtgcagcctgaagggcccggccagggggagggagctggagcctcccagccggagcaggaccctggcggcgggaacgggggtgcgtcacagtccgaaccctcccagcccggcacagagggggagagcggcggcagcgatctgcccccggagtggctgctgcctgatgtggcgtgatgcctgatacagaatacaaaaaggaaaggaattttgcccatgacatcccgagagagtgcgatcgtgttagccaaagccctggacagtaagaagggcatggagatcaaggtgctgaagacggaggagctgaccaccctggcggactacttcgtcatctgtactgcctcctccaccacccagatcaaggccctgtctgacgtctgcgaagaggcgatggagcggaacggagagcgggtccaccacattgagggccaccggggcggcacctgggtgctgatggatttctcctccgtggtggtccatatcttcatggacgaggcccggaaattctatgacctggagcgcctgtggggcgatgcccaggaggaggatctgagccaggtcctgaagccggaataagagagaacgataaaacagacaaagaggccggtgcgcttgcgcaccggcctcttcggagtaagaaagaaaaccaccgggaagttggtcctctgatcgaatgggagatgggggcgctacgccagagcgagggcgggcaggccccccatgtccccctggtggaccgtccggagctgatggatctgacagaagtcggcaggacggaccagggccggcggcttggagagttccagcgccccgctgtcccgcaggaggccggccacgaactgggagcagaagtagtggtcacgccggtccagcgggaggttgaagaagcaggagagggcacccagcagattgtagtggtatcgctgccgctgggcgtacatagcactgatctgccggcggaggctggcgtatatctctggggagacggacagctcatagaggcagcaggggacctgctgcctcttggtccggagctccggaccgatttgttcctccaccagcccggccgggagggcaaagtgggagtatttccgggcaaagctgtaaaagggacctatggggccgtccagtccaatggatgcatgggtataggaatccgcagtggccagatggatcagacgggaaaaccaggtcccggagcgggtcaaaaggatgtagatggtgcgcgcctctgtggtgtttcccatgatgttttctcccttcctgtctgtgtgcattcaggatacaggatggattctaagaggcaataaagagaagattaagattttttgaaagagagatgagaatttttttatcatctcttccgggagacggacgcggaaaaaggggggagcggcccttgcaatcatcgaaattttcggatataatattacggaatttatgcgtatgcctgccggagggttcactccggcgcagaaatacaggaaagtgtgattgatttgaagtacgatttcacagccatcgaaaagaagtggcagagcaggtggaaggaggaaaagaccttcgcctgccagaacggcgacacctccaagcccaagttctacggcctggtagagttcccctacccctccgccgccggcctgcatgtgggccatcccaggccctacaccgccatggacgtgatcgcccggaagaagcggatggacggctataatgtgctgttccccatcggctacgacgccttcggcctgcctactgagaacttcgccatcaagaatcacgtccatcccgctaaggtgaccaaggacaacatcgctaactttacccgccagctccatatgctgggctactccttcgactgggaccgggtggtggacaccaccgaccccggttactacaagtggacccagtggattttccttcagttatataagcacggtctggcctataagaccaccatgcctgtgaactggtgcacctcctgtaagtgtgtgctggccaatgaggaggtggtagagggcgtgtgtgagcgctgcggcgcccccgtcatccgcaaggaaaagagccagtggatgctgaagatcacagagtacgcccagaagctcatcgacggtctggacactgtggactttatcgaccgggtcaagacccagcagcgcaactggatcggccgctccaccggcgccgaggtggtattcaaggccactaccggcgaggacatcaaggtctttactacccggcccgacaccctgtttggtgcgacttacatggtcctctccccggagcacgccctggtgcggggctggctggagagcggcaggctgaagaacgcagatgcggtcgtctcctatcagaaggcggcggcctccaagtctgacctggagcgcaccgagctgaataaggaaaagaccggcgtggagctggacggcgtccggggtgtcaacccggtcaacggcaaggagatccccatcttcatctccgactacgtcctgtccacctacggcaccggcgccatcatggccgttcctgcccacgacgaccgcgactgggagtttgccaggaagttcggctgtgagatcatcgaggtggtatccggcggcgaggacgtgcagaaggccgctttcaccgccaaggacgacaccggtatcatggtcaactccgacttcctcaacggcctgacggtgaaggaagccattcctgttatcaccaagtggctggaggaaaagggcatcggcgaggccaaggtgaattataagctgcgggactgggtgttctcccgccagcgctactggggcgagcccatccccatgatctggtgcgacaagtgcggctggcagcctgtgcctgaagatcagctgcccctgctcctgcccgaggtggagagctacgagcccactgacgacggcgaatcccccatctccaagatgaccgactgggtaaacaccacctgcccctgctgcggcggcccggccaagcgcgagaccgacaccatgccccagtgggccggctccagctggtacttcctgcggtatatggatccccacaacgacaaggctctggcatccaaggaggccctggagtactggggacaggtggactggtacaacggcggcatggagcataccaccctccatctgctctactcccggttctggaacaacttcctccatgacatcggggtcatcccctgtgctgaaccctatgccaagcgcaccagccacggcatgatcctgggcaagaacccccattatgtgggcaatgtggagaccgaggaggagaagcaggcactcattgaaaagtacggcaatcaggccctgcgtccctctgtcaagatgtccaagtctctgggcaacgtggtcaaccccgacgacgtgatccgggattacggcgcggacaccatgcgcctgtatatcatgttcatcggcgactttgaaaagacagcggtttggtccgacgactccgtccgtggttgcaagcgcttcctggaccgggtgtggaacctggccaccgagcaggagcacaccggcgaggagtactccaaggccaacgaggccgctgtccacaaggccatcaaaaaggtgtctgaggatatcgaggccatgaagttcaataccgccattgccgccctgatgtccctggtcaacgacttctatgccaacggagccagccggggcgacatgaaggccctgctgctgatgctctcccccttcgctccccacatgtgtgaggagctgtgggagatggccggctacggcgggcaggtatgcctccaggcatggcctgagtatgacgagagcaagaccgtggccgccactgtgcagatggcagtccaggtgggcggcaaggtccgggccaacatcgtggtccccacggacagcgacgaggcggctgtagtggcctccgccctggcggagcccaagatcgcacgcatggcggaggggatggacttagtcaagtccatcgtggtcaagggccgcctggtgaacctgatcttcaagcccaaggcgtgagacccatccgggcggagcgggttttcataaaatgttcaaattttctcgggaaactggagcttgacaagaaggaaaaagtctaatataatgaatctgttaaagccatatgaatggccctttcgcggcaggggacgccccgccgcgccggagggagggaaatataaatgtcggaagtccgtgtaagagaaaacgagtctttggagagcgcgctgaagcgctttaagcgcagctgtgccaagtctggcgtgctggctgaggtccggaagcgtgagcactacgagagccccagcgttaagcgccgcaagaagtccgaggctgcccgcaagaatcgcaagaagttctattaaggcatcaaaaacgccgcagcgtgagctgcggcgttttctaatgacaaaagccctccagaccggagggcttttccacttttcaggcaggaaagggggtcacagctcgatgttgccggcggccttgtcattgaccacatagtaggccttgccatcctccggcttgacatacaggcagagcttcttgatggaggcggcgcggtggccctcagccagataggccgccttagcgcgttcggctaactcagagacgttccactctccgctgccaaactggacaaagatatcctccgtcttctggggtgcggccttggcagcgggctgctttttagccttggcggccttgggcttggcggcggtctcagcggccttttctgtcacaggcttggaagcctgttccactacggtctcggccgccttctcagcgacaggctcagccgccttctcaattgtctccggggtcttcttcatagtaggacactcctttttcttacgcaacatgatgcgatagtgggctgaggaagaaaaatcgacctttcttgtatgttacacttttattctgtcactttcaagagtatgatggaaaataattgaatttattcgctcaaaacaaaaaagcggaggaaaaaagcccttttcttatgaggtttgttggtgtgtttttggaggaaataggataaatttaaaaaaccggttaggaagcccgcattggaaggggaccttgccggcggaggagcggaagaaagcacagggatggccccacaattttatcagttcttaagattttcggtcttgcaacttaaactgtctatgctatccttatagtacagtcgggccggacctgctgagccggccggaaatgaagcttctgggggagagagtatgtacacgatactgatttgtgacgatgaccgggacatcgtctccgcactggatatctacctgaccagcgaggggtaccgcaccatcgcggcatataacggccgggaggctatccaggcggcggaggaaaacgagatccatctgatcctgatggacgtgatgatgcctgagctggatggcatccgggccacggccaagctgcgggaggggagcaatgtgcccattatcctgcttaccgccaagagcgaggatacagacaagatcctgggactgaacatcggggcggacgactacattacaaagcccttcaatcccctggaggtgatcgcccgggtgaagagccagctgcgccgctatacggcactggggggagcggagaaggcgcccggtatgctcaccgtgggccccatctctatggacgacgggtccaagcaggtgatggtggacggtgcgcctgtgtccctgacgcccattgagtataacattttgaagctgctcctctcccacccgggacaggtcttttcctctgcccagatctatgaacaggtatggaacgaccccgcctacggctcagagaacacggtggcggtccacatccggcatctgcgggagaagatcgagatcgaccccgccgagccccgctatctgaaagtagtgtgggggctgggctataagatcgagaaagggggagcgtgagtgagcgatgtccgaaagagcgtgccggccaaggtgatcgcctcactgctgattctggtgtccgtcttcagcctgtgctggcaggggatggctgtgctgcgggggatcgactatgtgctgacagacagctggcaggatacctgggagttcaaagagctgatccgggaacgggaggaccagctggccgagtggttcgcggccagagccgcgctggaggatcctggactggcctatctggaccaggtgcggtatgagacagatgcggagcggatcggagcagcaatggcgcaggatcagacctctttccgctaccgggtgctcagtcaggacgggacaaaggtcctagccaccaatctggcgccgggggagtccctggagcagctggtgcccgagatccactccgctgtgttccgtccaggggagcacctgacccagccctggaacagcagccccgatgcgggggaccctgcgctggtgacggaggggtcggaggagagcggagatgcctattatatcatcgagtgtggcgtcccccaggagctgtccggggcagaggatgaattttctgagctccatgcccgcgacacagggggccggaaagagatccccctgaggatcgctgccacctgtgtgtgcctggtgctctcccttgcctgctttgcctttctcatgtggtcctccggccataaggagggagtggaggggatcgtcctcacctggcaggaaaaaatctattttgacctgtatctgatcggggcgggggtcctgtttttcattctgattttcccgctgatggagttcctgtacggctgggggtatgcgtctcaggagagctatgagaaccaggtgagcgccatcgtggtctctctgtgcgtaacggctatgacggcgctggccgtgctggtcctgcgcaccctggtggtgcgctgcaaggcgggggtcctggcccgcactaccctggtttgccgggcatgcagctggatatggagcggtctgctggatgccatccgctccttccccatgatatggagaagcgtggcggggtttttggcctatctggtgctatgcttttttgcccgccgcatctggtgggacaatcccatccctctgtttctgatcaatcttgggatgctgctgtggctgtgccactggagtgtctgcttccagcgcctgcggaaggggagcgaggccatcgcgggcggcaacctgaaccaccagatcgacactacccgcatgccccacgatctcaggctccacgccgaggcgctcaacaacattgctgacgggctcaacggtgcggtggaggagaagatgaagagtgagcgattcaaggcggagctcatcaccaacgtctcccacgatctgaagactcctctcacctctattataaattatgtcaacctcctgaaaatggaggaggtggaaaaccccaaagcccgggaatacatcgaggtgctggatcggaagtcccagcggctgaaaaagctcacagaggatctggtggaggcgtccaaggcctccacaggcgcgctgacggtgaaccgggagaagatcggaatgtgccagctggtggaccaggctctgggggagtacgaggagaagctggaggcccggaagctcacagtggtccccagtctgccggagggggagacctatgtgtatgcggacgggcgccatctgtggcgggtcattgacaacctactgggcaactgtgccaaatatgccatggaggggacacgcatctatctggagctggtccgggggaaggggcaggtgaccctgtccatcaagaacatctcccgggacccgctgaacgtgccgccggagcggttgatggagcgcttcgtccggggggacgagtcccggaccaccgagggctccgggctggggctgtccatcgcccgcagcctgacggagctccagggcgggaccttcgagctggcggtggacggggacctgttcaaggccaccgtgaccatgccccagtcgggctgagcggaaagagaggagaggcatccgcctctcctctctttctgtcctctgcgcgaaaaagggcgtgtgtgcctgcctcttgcattggaactggtttcctgctataatcaacacgaaaaacaaaaatgcggcagtttgcgggcgcgccaacgcccgcaaacctgcgcaggtgctgacaccacctacacaacggccatccggccgcaccgcatggatattatacgacattccggcctttcttgtaaaggtcggttttgctgttgtactcctgcgtccgtgttgcatggagaagcccgtgcttctcgcgctgtgtaggcttgccctgcacggcgtttttgtttttcgcccgccgcccgggggcgggagcccccggggccggtgcggtgaagaacacaaatggaggagtatcgaacatggacgcagagacacagagacagacgccaaagcttaggaccaacctggacacgaactttttgaagctgttcgccatcctgactatggtggtggaccacgtggggaccgtctttttcccccagcacccggaattccggtgggtaggacggctggccttcccgattttctgctactgcctgacagttggcctgatgtacacacgggacatcaggcggtatctggggcggctggcgctctttgcagtggtctcccagcccttcttcgccctggccttccatccccacaacttctgggaagagctcaccagctggaacatctttgtcactctgtttttcagcctgctggccatctacggcgtgaaggagcggaagtggtggtggttcctcctcggggtgctggccatcaacgttctgaacgcggactacgccaacacgggcgtcatcctgaccctgatcttctacctgtgccggaacaagccctggctgggggcgctgctctatgtgctgagctacctcccggctctctggggcgggtccctggaggacccgatggccctggtggtggggggacacgccatcggctttgagatctttgccctcctgtccgcgccgctgatcttcctgcccacccacgtggagcccaagattcctaagtggttcttctacgccttctacccggcccacctgttcatcatcttcctggtgcggacggccctgcatatctgatgaggaggagagagcacagccgcccggctaaggccgggcggttcagattgtaaagccttgcagagttcacgtccgcaggtgcgaatcaggttccgaagtgttttccccgacggcatgtgcgtcggggaaaacacttctcaggctgcaagtgtaggggttgtccgtttgccacggtcgccccctgctcacggaagagtgcagctttttcgacagtgtcagccgcctcaaaatggggccctctgacaaaacgttgattttcctaaaacaatccctgatgtgtagcctttttgtccgaaaatccgtgtatgaagcagacagagaaaagggaggcgatgctatggagcgggaggaagcagagcggctggtagcgcggtacggtccatctgtctaccggctggcgtatgcccgcacagggagcaaggaggatgcagaggatgtcatgcaggagacctttctccgtctggtgcgcgccgccccggagtttcgggatgaggagcacggcaaggcgtggctgctcagggtggcgacccactgcgccgcagacgtatttcggatgccttggcggaaacgggatcttccgctggaggcggcccggggcgtgtcatccgcaccgccgaaggagccagacagcaatgtgctggcggcggtgctgtccctgccggagaaataccgcctcccggtccatttattttactatgaggggtattctattgcagagacagcggctgttttgggccggcgggagagcacggtgcgggcccagctcaccagggccagagccatgttgcgggaaaaactggaggtggaatgtatatgacaggacagaaatatcggcgggcaatggagcagatagagctgtccccggaccagcgggagcatctggttcgggctatgctccaggaacagccgaggagaaagcggaagagagctccggtccgtttgctgctggcggcggcactggcctgcggcgtgctgactatatcggtgctggccctctctccggccctgcgggagtatctgactcaggcgttgggaagttttgctccgtatagccaggaactgagcggggccacagcagtggatcaaaaggtgaaggtcagggtggtgtcggcggtaacggaccggtatcgcgtcaagctctatgtagagcttaccgacctgacaggggaacggattgtggacgagaataccagactgtcggcaaaaattcaaagggaggcgggggaagacggcttgcggtcccggtgtgtgggatatgacccggagacctgcaccgcattgtttgagttaaacgggaacatggaggagggaggaaaatatcaggagcagatgaggctgcgtatcacacaggtcagacctcagcagtaccatgagtacaccatagaaacccaatccatggcggcagccttgtcggaggactatgcgcagacaatggagctggaaacaggggaggtggttttgctccccggccagacgcagctgaagctgccagggctggagcgggcggaaatctcatccctgggatttatggaggatgggacgttccacacgctgttccgcctgccagagggggcggtcctggaccaagagggactggatggctcctggctttgtgtggacatgacagtaaatggggaaattccatgcagaaccgtagagagctgctgttttgtccgcgatggtattccatatctagaagtaatccacgatcatgtctctctggacgatctggacggaatttcctttcaaggggtggggggaaacattgtgcaatcggaaaaaatctccgggaactgggaaatcctgttccaggtggagaacatgagcgtccgggaactggagctgaccggggccgcggctggatcgactatttccactcaactgattttgacgccgctgggggcgatgatcacaggggaatacgagaaaggatactggggcgggcagagctgtgccgtggtctatcaggacggcacacgcatggatcacacagagatcgaggcaggtcggatgagcccggaaggggtctgtattctggggaattggacctttggggaggctgtggatctggaccgcgcggcggcgctggagatcggcggtctctggattcccctaaccggagcggacgctggtgtagtgcgggcagattagaacaaaccggcacctggacgtgtttcgtccaggtgccggttttctgtgctttgggccggatcagatccgcttccacacagctccgccgggcacgtcggtgacttcgatgccccgggccttcagctcgtcacggatgcggtctgcctcgggaaagtccttggccttcttggcctcgccccgggccttcaccagagcgtcgatctcgggggccccctcgccggtgacggtgtagcccgcctgggcctgggcggcctttaccttggcctgctcctcccgcaccgcagccgccttgtccagcagggacagggagagcacctggtcgaagctgtccaggatggccagccgggtggctccgctggccttggctttcagggcgtcgtacagcagggtgacggccatggaggtgttcaggtcgttgcccatctgctggagaaatttctctttatactccgccagaacggcttcgtccacagatccgtcctgggggtccagggcggcgatgcgggcgatgagcttgtcaaaggcggccctggcgttgtccaggttctcccaggagaacaccagccccttgcggtagtggctctggaggcagaagaaccggtagaccaggggatcatagcccttctcctccagcagggagacagtgaggaattcgccggaggacttggacatcttgccggaattggtgttcaggtggtggacatggaaccactggcggcaccaagggtggcccagataggactcggactgggcgatctcattggtgtggtgggggaaggcgttgtcgatgccgccgcagtgcaggtccagatactccccgttgtacttcatggagatgccggaacactcgatgtgccagccggggtagcccacgccccagggggagtcccacttcagggcctgatcctcgaatttggacttggtgaaccagaggacgaagtcatttttattgcgcttgttggtgtcctcctccacgccctcccggacgcccaccgccagatcctcctcatcgtggtcgttgaacacgtagtagcgctccagcttggaggaatcgaagtacacattgcccccggcctgataggcgtagcccttctccagcaggcgggtgatgatctgaatatactcgtcgatgcagccggtggcgggctgcaccgtgtcagggcgcttgatgttcagcttccggcagtcctcaaagaaggcgtcggtgtaatactgggcgatctccatcacggtcttgtgctcccggcgggcgcccttgagcatcttgtcctcgccggtgtcagcgtcggagctgaggtggccaacgtcagtgatgttcatcacccggttcacgtcatagccggaccagcgcaggaatttttccagtacgtcctccatgatgtaggagcgcaggttgccgatgtgggcgaagtggtacaccgtgggtccgcaggtgtacatctccacgtggccgggggtgtgggtctggaactcctccttcttgtgggtggcggaattatataacagcatgataaaaaacctccattttcttcggtgagggcggcctgggccgcccgggatcgtgagagaactatgcccgttccttcaggaactggtcatccagcagcttctccaggaattccacccgctgagacagggcttccagccgttccagggtgggattctccacgctggtctggtctacgtcatcggcgtagtgggtgacccgtccggcgatgcggacgatctgggcggggatgcccacggcagtggcgtcctccggcacctcgctgagcaccacggcgttggacgcgatccgggcgttgtcacccacccggaagggccccagcaccttggctccgcagctgatgagcacgttgtttccgatggtgggatggcgcttgccgtggtccttgccggtgccgcccagggtgacgccatgatagatcaggcagtcgtcgccgatctcggcggtctcgccgatgacgatgcccatcccgtggtcaatgaccaggcggcggccgatcttggcgccggggtggatctcaatgccggtgatgtggcgggccagctgggagttcaggcgggccaggaagggaaggtggtgacagtagagccagtgggagacgcggtggaagatgacggcgtggacgccggggtagaggagaaagatctccagcttgctgcgggcggccgggtcgcgcttctgataggcgcccagcaattcactcagtgactgaaacatgatgtcctccttgggggagatccattccgtctccccatttattgtgggcgggaagaacagcacccgggacatcgcggtgcgctccggcggctgtgccggagccggggaaagggaagatgcaaggggaacgcctccttttcgcagcttggacacaaacaaaagcgcccctcatgcccacaggcataagaggcgatcgctcgcggttccactctcatttttcactcaaaggccgctatcggggccagaccgggcggcattacccgccgcgctcccggacgcacttcacatcccgcggactgggaccgctctcagtcggtggcgttccctctctgtcgaccggtggaggatgctacttttccgttcacagcgcttacgatttattatattatcatctgaaggaaggggtgtcaaggaggagggagggcttttcaaaaattttcccgacgccccgccggggcgccgggaaaagggtcatcggaaatagaccaggggatcgtccgggcggtcggcccgctccacccgctgggcgtagaggaccacgccctccccctgatagacgggggactcctcccactggatgcgggcggccaccatgacccattcccccttcttcagggagcgggaccggtcatacttgcacaggaagccgaagaagcggatgtcctcggcgcagcaggtcatggcgttgcggccggggatgaaggtgcccttgggcagcttcatgctggtcatggcctgggcccggaagaccacggtcttgccggtgtagcgctctgggtgctcctggatgtccaagtaccagatgccgtagtcctcgtcctccaggacgatggtgtccgcctccagggagtaggggagaatgtcctccacctccagctcctcccccttctcgtcctcaaagacgatctcgcacatgcggttcaccgcccggatggagcgcttccagccggacaggggcatgtccggcgtgcagcggttgaagaggaccatatcggcctcggtgaccatgtcgatgaccatggactgcatgttggagcggtacatctcgaaggtggagccgtcgatgacgtcgatggcctggtagagcccccaggtcttgggcagcttcaggtcccggaggatctggatgggccacatgccgttgtactccaggagcacccgctccggctgatagcggcggtcgatctcctggagaaagctggtgttcagctgggcctggtcctggacagggaccaggcgagtgttcagcctggacagctgctccggatcatactccgtctcgccgtcctcacacatcagcaggacggtgcgctgcccatcggaaaaataatccatattcagggtgtcggtgagcagagtggtcttgccgctgtccagaaagccggtgatgaggtacagcgggatacggggatctttcatgcagcctcacctcacgccagcaggaacagcttttccagcctggcctcgtccaggcccgcgccgatgacgcacaggcggccggtgtagtcggcgctgccctcccggatctggaactcgccggggaccaggtcgaagtggagccagccctcgctgtcctgatcggggaccatgcccttggagcggaggatggtgccatagtcctccgtcatggccaggacggaaagaatgtcctggagttcctcccggctgtacttccgaggagtctcccggccccagctggtgaacacctcgtcggcatggtgatggtggtggaaggtggagtggatgcagctgtcgcacaggtcgcaggagccgcaggccccctcgcagcccagctcagcgtggatggcgtccagctcctcctgggtgtggtgatggccgcaggagcaggagtccccgtggtcatggtcgtggtggtgctcgtgctcatgctcatgctcgtggtcatggtggtggtcatggccgcaggagcagggctcgtcctccccgtggtcgtggtggtgtccgatctcctccatcagctcgcgggccaagtcgtggcccccctccatggcagagacgatctgggcgccggtgagctggtcccagggggtggtgaggatagccgccttggcgttgtggggacgcagcatggctacgtcggcggccagcttggcctggtccatgttctgggtccggctgaggaggatagcggaggcgtgctccacctggttgttgaagaactcgccaaagttcttcatatagatcttgcacttcaccgcgtccaccacggtgacaaagctgtgcagttccaggggggcaccgccgtcccgcacccgctccacggcggcgatgacatcggacagcttgcccacgccggagggctcgatgatgatgcggtcgggcgaataggtgtccagcacctccttgagggcggtgccgaaatcccctaccagggagcagcagatgcagccggaattcatctccgtgatctggacgccggcatccttcagaaagccgccgtcgatgccgatctcaccgaactcgttctcgatcaggaccactttctcgccatggaaggactcggagaggagcttcttgatgagcgtggtcttgccggcacccaaaaacccggagataatgtcgattttggtcatggtgacacagatcctttcttcaaacaaggcggcagggccgccggatggacagagggggaagggggagcgccggataccagagcctggtatccggcgcatagcagtccgggaaattacttctgccggacggtgatctcgttgcgcttgggtccggtggagaccagggtgatgggatagccgatcctggactccaggaagtccacataggcctttgcctgctgaggcagggcctggtagtcggtgcagccccggatgtcgcacttccagccggggagcgtggtgaacacgggcctggcccgcatcagctccggggtggtggggaagcggtcggtgactgtcccgtcgatctcatagccggtgcacaccgggatctcatccagatagcccagtacgtccaggcaggtcagagccacctgggtggccccctggaccatgcagccgtacttggtggccacagtgtcgaaccagcctacccggcggggacggccggtggtggcaccgaactcgcccttgtcaccgccgcggcggcgcagctcatctcccgcctcgcccagcacctcgctgacgaagggctcggtgttggagcccacagaggaggagtacgccttggtgacgcagatcacgtcctccacagcggtgggggggacggcggcccccacgcagccgaagccggccagggtgtgggaggaggtggtcagggggaagatacccaggtcagggtccttcatagagcccagctggccctccagcaggacggtcttgcccgcccgcagggcgtcgtgaacaaaggtgacggcgtcccccacataggggcggatctgctcccgcagctccatcagctgctggtacagctcctccacgtccagggagggcttgtggtacaggtgctcgaacagcacatttttcagggagacggcggcggtcaggcgctcccgcagccggtcctcgtggaacaggtcgcagacctggatgccgatcttggcgtatttgtccgagtagaagggggcgatgccgctcttggtggagccaaaggccttgccgcccagtcgctcctcctcgtagctgtcctggagacggtggtagggcatcaggatctgggcccgctccgagacgatcaggttgggggcggggacgccctggctggtgatggagcccagctcgtccaccagcttctggatatccagtgccacgccgttgccgatgatgttggtcacatggggatagaaggtgccggaggggaggatgtgcagggcgaaccggccatagtcgttgatgatggtatggcccgcgttggccccgccctgaaagcggatgaccacgtcggactgctctgccagcatgtccgtgatcttgcccttgccctcgtcgccccagttggcgcctacgatcgcttttaccatatctgttacctccgtggaccgggattcgcaaccgcacagcggatttgccttatccggccaacatgacagcattcttattatacttcctctaaaagagggatgcaagggaaaaagctgtttttcccatgtatttttccgaacaacggcagaaatggagcccatgagtctgcggagacgatagggcgggagaacattgacagaatggtaaaaaaacattaaaataaaaaaagcgccttttttggtcggaatggacaaagctctgcggtgagccggcgcggagtggaagaaattttccccgggacaggcgctcagacaccccggactgcacatgcggtccgggagaaatagggaggtagcagagtatgagagcaatgacaagacgcgcgctggcgctggtgctgaccctggccatggcgctgtccctgtgtctggcggcccaggccgccggcccccaggtgacggtgaccctggatgggacggcgctggagctggaggtccccgcctatatcgacgggcaggaccggacccaggtccccgccagcatcggcccccagctggggctgacggtccagactggtgacgggagcgtcaccttcaccaaaggagaggccagcctgaccttccaggacggggccaaggaggcgggcggcgtgaccatggacaccgccgccgacctgtccggcgaggtgggctatgtgcccctgacctatctggcccagttcttcggcttccaggtggcctggaacggcgtcacccgcactgcggcggtcaccagcacggccgcggaggaggagaccgctgtgaccaagctgccccagctggtgtattcagagctggagagcctgatggcccagcaggcagcccagtatcagaccaaggacaacgtggtgcccatgctgtggcagggcgtgctggaaatggacgtccaggtgggcgatgccgcccgcaccgccaagctctatgtgccccagggcacgccccagggcgccatgttcgtggtgatgaacgtccctgagggcctgaacgccgtgagcttcatggagaccagcggctggatggacaaggcggacgaggagggcttttgcctgttcgtgctggaacccgcccagggtactccctggggaactctggaggaggagcaggcatacatcaatgccggcatcagcgccgccaaggcgggcaagtggctccagcccggtcccagcatgtacctggtgggctacggtgccatgggtacctgcctgcagaagtacgccatggagaatcccctgaatatcgccggagcggtgttcctggatgccagcctcattgacgccggctacatggcgtccaacggggatgtgtcctttgataccgataccaagacctacggcgtcacccgcaaggaggtgccggtgcccgtcaagatcgtggaaagcaccatgacggagcaggcaaaggctgtggcggactactggcaggccgcagccaacgacaagaacgccgtggagcgctttgctcctgaaggcggcgagatcctggcggccgccgtggtcaccgaagaggggaactatgactacgccctgcctgccaccaccgacatgatctgggacttcatgggccagttctaccgctacggcggcggtgtgctgtccaacgctatctcctggaaggtggactatgaggagatgggagtggagttccgaagcttcaccgactcccagggcatcgaccggcagtatctggtctatatccctgaggcttaccgcggcagcggcgagcagctgcccgtggtcattgcctatcacggagcctccacctctatgcgcaatttctttgagaataccttgtggtacaatatcgccgatgaggagggcatcatgctggtgttccccgagtccaccctggtgccggtgccccccaccctgggcggcggcgaggccaaccccaccgcctaccgcgcgctgtggcaggtggaggaccctgagctgcgctacaccgacgtggtgtatgccgaggacctgctggaccagctgatcgcagtctatccccaggtggatcagggccgcatctactgcaccggccactccatgggctgcatgatgacccactacctgggcagtgccgaggtctcccaccgcttcgccgccatgggcgccacctctggccccctgatggccagggaggagacgggatcccagaccgtgcccatgttcatgaccatggcccagtacgacatgtggagctatgacctgaaccaggacgacaccatgaccacccaggcggtggacatgtggctggtccgcaacgggctggcggccgcctccaacgtggtcgaggtccgtaagaccggggccactgagacctatgtggagggccgctacaacaactccgtctgggagaatgaggacggcatccctctgttccgctacgcctgggtcaccggcaaggaccatgtgaacctgccggcagagaaccagctgctgtgggacgagtggttcagccagatcaccctggacactaagacaggcgtgcgcgcctatcagggacaggccatcggctgagtcagacaagagaacagaagcgaccgggagggcgcggcatccgccgcgccctccctctttgcctttgagaggactgggaaaaggaggtagccccgcggcggagaagaattgaagatgttccaaaaaagtgtggattgacgctttgttcacatctgaataagataggtgatacatggcgctcctttttgagaaataggacaaagggggtggctcagcagagaaagtggagagaggagcggaaggggcgccggagaaatgaaacaagaggagggcatccaacgtgagagcgatgacaaaacggatcttatctttggcgctgacgctggccatggtgctgtcgctgtgcctgacggtccaggcaaagggctctgtgaccgtcactttggacggacgggccctggagctgaccgctcctgcctatgtggacgggaacggcaggacccaggtgccggtgaccatcggcccccagctggggctgacctaccagcagaaggagggtgaggtcacctttgtaaagggggaggccagcctgaccttccgggatggggagaagcaggccggcagcatgaccatggacaccgccgccgatctgtccggcagcgtaggctatgtgcccctggtctacctggcccgggctttcggcttccagctgatttggaacagcgggacccggacagcggccctgaccacgccggtggagggcttccaggcccgggacctggcggagatcgaggccccggcccacgattacagcgagagcaaccagctgcctctgaccgggtacttcaaggcatccctcaccggtgagtttgccggccgtgaggtgcgctactacatccccgacacagcggtgatccgcccctattaccactttatcgctgtgcccgacggggtgaacgcggaccagttcctggtggacagcggctggaagcaggtggcggatgagaccggcgagtgtctgttcgtcctgctgcctgatcagaccacctatatgtggggagatgtggagcaggagaaggactatattgccgccgccaaggcatatcactccggcaatggcgcctatttcaccaccttcggtgagttctatctggtgggctatggagccggagcagcccccctggaggcctgggctgcggagaacccccatctgatcatcagccaggcctatctcaacgggacgacctgtggcctggagaacctccgggcggccggagaggagtcctacggatggaagcacatgaccgacggggatatccgggaccgggacggcgacggcatcaacgagcgggtggatgagaacggcaaccagaagatcctgtatcagatggcggaccggctggatcagatcctgaacccggacaaggggagcgaagcaggccttctgaccaagggtgatatgccccttcccacctggctggtcaacgcggagtccgacgacagcctgacctactggaagcaggtcaaccgggcggacagcgcagacgccagcgtgacagcactgggaagcgttccggtgagcgggcaggtatacggccagaaggaggacacctgggccaccgagtatgcgggccggatctccaaggtggtggatctggagaccgccgcagacacggtctcttatgacttcacccgtgctctgcgggacgagatgaccgactacacccggtatgacaactccatctcctacggcaacggcctgacctaccggctggattataccgacatccaggtggagcgcttctcctcccgggacaagcgggcggtggggaccgtcagcggcccggatctgaacgggaacgaggtggaggctgagatcaccatccaggccctgactctggacgacggctatgtgacagacgtgctgctctatgtgccggagacagcggggacgaaggacatccccgtggtggtggtatggcacggcggctctcagaccgggcacctgttcatggattccactgcctggtggcagaccgccgcggcggagggctttgccctggcgctgcctacccgtaccaaccacaaccagggtacatcctccgactatgacctgcccatcttcgacaaggtggtccagtatttgaagaacgacggccgcttcgatatgggccggatctataccaccggccagtccatgggctctgtggccaccatcgcgctggcggagaaccgggcctcccagctggccgcggtgatctccagcaatgccggcgggcccagccgtctctccggcggcgacgccatccccgccggactggtggtgggcgaaggcaactacgccgaccggggcatccccggctatacggctgacaccagttatcccgaggacgacaccagcgtgctggtgcgctccactgaggctgccgccgcgggcgccgacatctactgggacgcggccaagaacctgaagggcgcgaccaatcacaacatgaacgactggatcgcctatttcaccgatgccaacggcctgggcgaggacagcctgagcgatgtgatcgtgtacagcggcggaaacgccctcaacggcggccacgatgatgcccagggcagcctgagcgattgggagagcaacaacgcccgctaccgtacctggaagtggtacaatgaggatgacatccccgtgatgacctacatcttctctctgtacgaggcccacaactgcatccccggtttccggccgctgatgtgggacttcctggagcattacagcgtggagaccgccgccgacggcacggtgacccgctattacagtgcctccgggtttgaacaggacgacgcggtcgtgatccagtgaccggcagatgacctccggggcggagccaaaggctccgccccaaattttgtcccggaagcccggcatacagatgaaaagcggcagagactacaaaaagtggggacaggtcaaaaaaatggagattgacggtttggagactggttattaaactggacatatccaaggggcattttttgggagatcttacaagggaggcgcggcacaaacagagcggataaggagagacccggaaatgccatggaaaggaaaagaggaggttatcgattgtgcgagcagtgacaaaacgcatcctggctctggtactgaccctggcaatgatcctgtcgttggggctgaccgtacaggcagtgggcagccctgtgtccattgaactaaacgggacggccatggagctgacagccccggcgtatatcgacggacagaaccggacccaggtgccggtgaccatcggcccccagctggggctgacctatcagcagaaggagggggaggtcacctttgtaaagggggaggccagcctgaccttccgggatggggagaagcaggccggcggcatgactatggataccgctgccgacctgtccggcagcgtgggttatgtccccttggtatatctggcccggtttttggggatccaggtggcttgggacggagccagcaggacggtctctctgaccggcagtgccggcctgactgtggcagacatcagcagtattcaggcttatacggatatgaccttttatggtcaaggactggtttcggtggagatcacctaccgtccaggagtggatgtgagcggtgtgacagcgcaatcctacatcctggaggatcgggggaccctgtccccggactttgggcggatcgagatcgcgggtgtgtccgttcagggacagactgtgaccctgagtattgcggaaaacactggagccacttccaataataagatgatctataccggagatcagaaggagggctcccgggaacgcaacgcctttggcatttactgtaccggggcttggtaccgtgatgtaaatggtgtcatttactacggtaaggaggacaccgcagagtatagggccaacaccaccggaatgggctaccaggcccggccctgcctggagctgaggctgcgccacaccggcgaggcagagagcgcttccgcctgcctggccaatgaaaagggtcagtataacgccggcggtctgtggaagcggaccattgacgccaattttggcgaaggcggcttccagacctttgaggagctgggcattcaggtggaatccactgcaaagaacgccaaggatgtggtcccggaccagtatgtccgcggctacctctatgtcccggaggattacaccggtgatgaggaagtccctctggtggtcaccatctcgggcaatggtacctccttctggatcctggaagacggcaccaataattttggtaccaacatcatgtatgatgcggccaccacctcctggatcggaaagggcgccattgtggtggggatccatgaccgctcgatcatgggcggcaacggcgaggactatgactatctcctggacgatgtgaatgtgatcaagtatctcctggagcactacaacatcgaccgggaccgcattatcatccatggcaattcccgcagcaccatggcggccagcaccatcatccaggcactggccggacagccctactccgccggacaggatgcggccgactggggtgaccgtccccgtaccaagaccctggataaatcggtatatgacttcgagatcggcgtgttcctgtgcaacaacggcctgtatggcgggcaggggctctggacctacgaggaccgcctggcggtggcaaagaccggtctgcgggcatggatctttgacgcggagcaggacttcaacaatattgattatgtggaggaacagatcaaggcgttcaaagaggctgggtacagcgaccagtggatcgcggagaacctgcgtctcacctgcttcccctctgaactgttctactactggggcgagagcgaccactccaccacccggatcaattattggtactttggagacggtgagatctattacggctctgactgtcatattgatgagaatgggcagctggtgtatgacagtaaggtgatgccgggcggaacttacaccgttgaggcccggggagccagccgctccggtactaaggagggtcatgcatacaccgtgtatggggaaaacttccaggagtgggcgctggaaacaacatgaccgatcccacctatgcactgaagtccgtggggactctacggcagcgctatacccgccggctactctgagaaatgaatggctgacgatctgcgggtctccttctacaaggactacaagttcgccgagtggggcgtgaacaatcactcctgtatctcagtgagtgggctttgaccagaggagtgtaagatctatttgctttctctcttgctctgcggagcgtctccttagcgatatggggcagtccctctggggtctgccacatatcgtattttggccaaggggaaggggagaagaaaaaatgtttatctttcaaaaaaatgtggattgacgttttggatattcaaaattaaaataaaactaaatagagcgtcttttttgacgaaaatgacaaaggaggggcgcaaagcagagggaagagaggaaatgcagaaaagagctctatccaatcaggagatcctgaaaagaggaggtcatcgatttatgcgaaccataacgaaacggctcctgtctctggtgctgacgctggccatgttgctctccctgggcctgaccgtccaggctgtcaacacggcggtaacggtcacgctgaacgggacggcactggagctggaagcgcccgcctatatcgacgggcaggaccggacccaggtccccgtgagcatcggcccccagctggggctgacctatcagcagaaggaaggggaggtcacctttgtaaagggagaggccagcctgactttccgggacgggtccaaggaagctggcggcatgactatggacaccgccgccgatctgtccggtgaggtgggctatgtgcccctggcctatctggctcagtttttcggactgagtctgacctggaacggcgctgcccgcaccgctgcgctctccaccggctccgacctgactgtggcggacatccagagcattcaggcctataccgacgagaccatgtacggcaccggtgtggtggaggtgcaggtcacctataagccgggtgtcaatgtcagcggcgtcaccgccgacagctacatcctggaggaccggggctccctgtcccccgactacggtcggatcaagatcgctggtgtctctgtccagggccagactgtgaccttgacgattgacgacggctctgcagccaccgccaacaacaagctggtctacactggggatcagaaggaaggcccccgtgagcgcaacgtgttcggcatctatgccaccggcgcctggtaccgcgatgtgaacggcgtcatctactacggcaaggaagattccggcgagtacaaggccaacaccaccggcatgggttaccagagccgcgcgtgcctggagctgaagctgcgccacgccggcgaggctgagagcgccgccgcctgcctggccaacggcaagggccagtataacgccggcgggctgtggaaggagacggtggaccgccagttcggcgctggtaagttccagtcctttgaggatctgggcatccggattccctctaccgccgcggcagctactgacggcacccaggacgcctatgtccggggctacgcctatatccccgccaactatgatcccgccaacggcatcgtgttcaccctgcagggacagggcatctcctactggaagctgcccgacggcaccgatgacgatggcaccggcatcatgtatgattccgccaccacctcctgggccaacaagggtgccatcgtggtcaacatccacgaccgctccagcgcaggccccggcgagtatttcgatatctatgatttcgtggtggacgatgtcaatgtgatgcagtatttcatcgacacctatggtgtgaccggcaacatcgtactccagggcaactccagaggcaccatggcctccgccttggtcattaaggctctggctggacaggcttacaacccccagaaccagaagaaggatgccggactggaggagaccagcactctgcccgagggcaagtatgacttcaccattgacgcctatatctgccagaatggtaccttcgggtacagctacgatgaggaggactgggccgccatcgctgctaccggcctgaaggtttgggccttcgacggagagcaggactccaacaacgtggagagcatcgctcagtacacccagatcatgaccgaactcaagggggccgactgggcgaaggagaacattcgtcttaccggttacccctctgagatctatgcctactggggtgagagcgaccactccaccacccgtatcaacggctggtactttgatgatgccgctttctatggccccgacttggaaatcgtggacggccagatcgtctacaataccaagctgagcgacggggatacttataccctggactgccggggcagcgccgccggcagtagcaagcagggctataagtacaccgtgtacgacgaactgtatcaggagtgggctctggacaagaaaggcgcctccgtcactgccggagctcccgccgctgaccagatcacctctatccaggccacagcagtggctaacttctatggctacaaggtgggtacagtggacatcacctacgccgcgggtactgacctgaccggcgtcaccgccgacagctacaccctgtatgaccggggcttcaataatccggagttcggcgaggtggagatcaccggcgcctctgtggatgggaacgtggtcaccctgaccgtcgatcaggggacggataaggtcaccgaccgcagccgtgagacttacggaactctgtgcaccagctccagctggtatgtggattcagaggggaacatccactatggcgatactcagaccactgatgccctgggtatcaccatctaccccaacaccattaaaaagggcctgcagtggagagagaatatggacctggtgctgtgcgtcaacagcgacgacatcaccaccggtatccgctccactgacggcgctggcactatgctcgccgataccgtctgggagcccaccatcctggccgatgacttggacaaggtggagctggagatggtggatgtaggctggaaagctgcagactacactatgctgggcgatcagggcgaggtccccgtccatgttatctaccccgacaactatgaccccaaccgggcggagccctaccccgtcatcgactatcagtgcggcggcggcgtctgctactgggaggtcactgacggcagcaccaccccggccaacaacctgggctgcaacgtggtctatgacgtgatgatgaccgagtggcaccgccagatgcctgacgccatcattatgagtgtcaacgtccactcctccacagtagagaattctgccaaggagatcgccggcgtgctggattacgccatcgagaactggaacgcggacaaggaccgcatcatcctggtgggcaactcccagggcaccctgatctcctccgacgtgatccgccagcgccccgatctggtggcgggctatgtggagtgcaacggcaacctgggcggcatggcatccgctgatgcggtggacggcaccctggcaaacagcagcctggggagctggaccgaggaagaggtccaggccatgatcgacaacgaggtgtccgtgtggatgttcaacggcgagaccgatggtgacaaccccgctgcccagcaggacgtgatcgagatcgtgaaggacctgtaccgggaagccgggaagagcgagtcctggatcgaggagcatgtccgggcctccgggctccagtcctggaagttcaaggattggggcgagaccgaccactccgttaccaaggtggtggcttggtactatttgggccagccctacatggatgtggagaagggcacctctctgaaggccggcgacacctaccagtattccggcaaggaggagagctacgagaagtatcagtacaccatggactatgtgtacacggtgtacccggagagcgtggcccagtgggcgaaggacgttttcgcctctgtgtaagcgcggatagagccggtcccgcaggccggcggaaggaagagcattactttgcttcctctctcacgctctgcggagcgtctccctaaaagagcgccgggcagacccgtaagggcctgcccggcgctcttttagggaaagggaccgttttttctgccccgtcataggatagggaaagaaatgggggcggtttggcatgaaaagggaaaaacagatgggggaggccccagcggtcctgtggcgggaggagaaaaagaccctgactctgtgcggggagccggtgctggaggagaccctggcctggccggagtttgaggggaaggggcgggctgtgcgccgcatgacgggctactaccggcgcctggtccggtcctgccgcctgcgctgggagcgggagacctactgcctggcctgcctgcggctggctgcctgccgggaggagtcccgggtcttccggccctggcaggcagggctgacgggagaggtagccatggagggggcggacctgctgagcatccggatggagctgcgggaggtgcggggagacgggcggcccctcctgtcctgttccggggtgacctgggactggaaagcgggcgcgccggttccgctgggtatgctgctgccggagcggagccgccggcggcagctgctggaggggatcaggcaggcaggggagggggagctccggagtgggagctgtctcctggacccggactggaaggagacggcgaggcggaaatttcgggccagccgcttctgcctgcgcccggagggcatcgagctcttttatccccagtgttctctggccccggcggtagagggggtgccctccttccgggtgcccctggcgggggctgcgtggacggcgggggaagggacagcctcagagacataaagctggggcatggccgcatacctcttatttgaggtgatggtcatgctgctctcccgtctgaatgacgtcgtctggtccccctggctgctggggctgttcctggcagcggggctgtattactccctgcggaccggctttttccagatcttccgcatacccctgtggctccgcaccaccttcggagccatgctgcgccggcgggggcgggggaatgggcggggtatctcccagttccaggccctggccaccgccctggcttccaccatcggtacaggcagcatcgccggggtggctaccgccatctggttcggcgggccgggggcggtgttctggatgtgggtctccgccctgctgggcatgatgacagggtgcgcggagaagctgctctccgtgcgctaccgccgcgccggccccgcagggtggctgggagggcccatgtactacatccgggacggcctgaaaagcccgctgctggcgggctggtttgccctggcatgcctgccggccaccctgaccgggggagacatggtccagtccagctccattgccgccgccctccaggccaccttcggatgggaccggctggcggtgggggcggccgtcgcggtcctgacggggctggtgatggtgggggggatcggacgcatcgcccgggtgagcagcggtctggtcccggcgatggcgctgctctatctggggggcggggcggcggtgctggctgcccgggccgaccagatcccggaggcgatggcactgatcttctgctcggcgctccgaccggaggccgcagtagggggcggaatgggatacaccctggctgccgctctgcggtacggggtggcccggggggtgttcaccaatgaggcggggctggggacttccgccatggcccacgctgcggcagaggtggactgtccagcccggcaggggatgtgggggatcgtggaggtgtgcgtctccaccctgctggtatgcactgccaccgccctagtcatcctggtcagcggggtgtacggcccggcggacgccctggtccggggggcgttgggggcagtgcctcctgaccggctgggggcgccgctgacggcggcggccttctcctctgtgctggggccctggggtggggcggtggtctccctgagcctgctcctctttgcgttctcatccatcctgggatggagctggtacggggagcagagcatcctctacctgaccgggtccaggcggctggtccccgcataccggctggtgttcctgtcctgtgtggtgctggggagcgtgtgggagggggaggcagtgtgggagctggtggacctgtgcaacgcgctgatggccatccccaatctgacggccctcctgctcctctccccccaggtgctgcgggagctgcgggactgggagcggaccggaggataaaagacaggggccgcggaagtttccgcggcccctgtcaagggggaagatcactttgagacgagttccggacagacttcctcatagaagcgctgggctccgtcgtgaagggggatggggaggtcctcacacagaaaatcccggtcggacaggacagacatggcgggatacagttcccccatgatatcggcagactcccacagggcctgggtcatggagtaaaccagctcctcgtccatggagacgtctacacacagcaggcacttgaccccaaaggtgtctacatcctgggactgcccggggtaggtgccggcggggatgacggcggggtagtagaggtcgttctgggagaggatcagatccagctcctcctgggtgtagcgcagcaggcgggaggggacccgctccgggagctgagccagcccgctcaccggggcgccggtaaagccatggatggcatccaggtcgccgctgaggatcaggtccgtacctgcccccaggctgcagttttccagtacagtcccatcgccatccagcctcagggcgttgatcacagcccaggtggccagctcggaggcggagccctgagggcctgcgccgatgcgcatccccttcaggtcatggacataaaacgcgccggtgcgaatgggggacatccagttggaggtgctggaaaagacagcggcaacggcccgcaggtcttcattagtgggggcgctgtcctccgtgccgtagacagcggtataggcggagtcgcccgccaccagccccaggtcgatctcgccggaggaaaggttctgaatgttcatgaaggagcctgtggaggtgctgatgttgaacttcagctggtcggtgctcaggacctgggcgatggcagtgcccacgggggtcatagtgccaccggtgtctgcggtgccgatggtgagcacgatcaggccgtccgcatccagcggtgagatatcctcgggctgcgatgcgcagccgccgcaggcgaggcagagggcggtcagacatgccaggaccgccttattgcgaaaaagccccaagagaccaccctccctatccatggaattcatgctgctgtctctactataccacagatgtggaagattttacaacctcaaaatacaatgggacaggggcgcgtatctgatacgcgcccctgtcccattgtaaagagggaggtggatcgatttagtgagcaagaaggccgccaaacacggagaggaaaatggggttatagatatcgtcgataatgacggcgaaagagggatacagcacccaggccacattgtgccagccgtactgatccataacagccttctcgttggcaacggcattgggaccagagccgcagccccagccgcagttgccggcggccatgacggcggcgccgtagttgcggccgaacatgttgtaggagacaaagatggcgaacagagccatgagcgctgcctgaagcagcaggatgatgcccatctgcccagccacgtcagccagagcagtaatgtcgatggtcatcagcaccagggccagatagagctccaggaacatatgctccagggcgtccacctcgggggtatagaacttgatgtgggcggcctccatcacattgcgggcgatggcgccggcgaacaggcagccgataaacttgggcatctcgatcatggggatgttgtccaggatgcagtagatgggcatgcccagggcgcacagcagcaggaccatgccgaacatggagaccatgcggctgttgctcagttcattgatcttgccgtcagcggccgcctcgggcttgtcgttggggtccgccttcaggtggtggcggctgataaggaacgcagccacagggccgccgatgagggagcccatgatgttgcccagggtgccggcggtgacgcccacggtggtggcggactcaggggcaccccaatcgatgaagatggggccgaaagcggaggcggtgcccacgccgccggacatggaggcggaggaacactgaagagccagataggggtccatcccgatgaggttgcccaccagtacgcccagcacgtcctggagggtgatcagcaggcaggcggccacagcgatcatgatgcacagcttgccgccggcgtgccggatcagcttccagctgaagccgaagcccacgcacataaagaaaatgttctggcacaggtcctggatggtcttgacatcgaaggaaaaggccatcacgccagatgcctttagaatggcgactgcgatagagaacagcaggccggagaccacaggagcgggaattgcaaattttttcagaagcgcggagcgcttgacgatggcgtggcccagaaagatcacaatagctgcgaaaccaaggctggtgagatactcgaactgaaaggagctgaccgctccatccacaccagctgtgtaggtcccgaaatagccaaggattttttccaaagtcatacacatctctctcctttctttcctgcccggcagtccgccggacacacaccttttacaataaagattctataaagacaaggggaagaagtcaatttatcgtaattattgaagggcttttgtaactattgtaactgaataggcccccaaaatcaggctgtgcggaaagaaagctgagcgggaaggaaaaagcaggcatcggtcctgcgatgcctgccgggagggatagggatgatattcagctgtgcagcctcaggtagcggatggaggggcggcctccggtctggtaatcgatggagctggtgatctccccctgatccaccatgtagttgacatagcggcgtaccgtgatacgggacaggcccacatgttcggcgatctgttcgctggtaaagaagtgctccgggttctcatcgaaaaagcggcggatcctggacagagtgctgaaattcacgcccttgtccaagggcgtaccgggaggcactgcctcccggtgatggaccagctggtcaatggcgctctggtccatgctgccgggcccctgctccagcagccgcctggcctgaaggaaccggtccagtgcctgacggaagcgggggaactggaaaggcttgacaagataatccagcaccccccgggcgagcaggccctggacgatatgggtgtcgttggcggaggtgaccgcgatgatgaaggggctctcccccagggtgtggagctggtctacgaattcagtgccgttcatgcccggggtgtagtagtccaggatgatcagatccgccttgagctccggcaaatgggccaaagcctctccgccgctcttgaaggtgcggaccacacggaactggctgtccgcctccacgtactgcttgtcgatggcggccaccatggggtcgtcctcgatgataatgacttggtacatccggtctcactcctctctggtaaaggtcagggtgaagcaggtgcctaccccgggctcggtctccagctcgatgcagcctccatgctcgtccaccagtcggctgatcagatataggccgaagccacgcccctcccccttagaggagaatcctttgtcccagatgtggggcaggatgtcgggggcgatgccgccgccggtgtcctcgcagaccaccagattgcagtcagggcggcagtacatggacagcttgatctcccgcacctcgctgtggcttcggctgagctcgtcgatggcgttttccaacaggttgcccaggatggtggcatagtcctccggggagaggagcaggtcctcctcccggcagaagctgtcgtgggttacggtgagcaggatgcccagctcggcggcgtgcatcatcttcccgatgatgagggcgcacaggtgggacacccggatacagtccgccgtctcccggatggactggctggtgaccagactggtgttcatgatgaactggacagctttctggctctcgccggtctggagatagcccaggatgatgtggagcttgttcatgaactcgtggttgaaaaagcgcagggtgtccagcatgtagcgggcaccggagagctcgtcggacagcttgcgcatctccgtcttgtcgtggaagacgttgagcaccccctgggagccgttctcccccaggatgggcacctcactggccaggatctggcgctcctggatgacgcaggagcggttgtgcaccgcctgcccgctgcgggccacctggatgcagcccgtctccgggaagaagcgggtcagcggctgtccctccaggggggtggagccgcactggagcagggtccgggcctggtcgttggcaaagaccacctgcccccgcaggtcggtggccaccaggccgtcctcgatggagttgagcaggtcgtcctgctgtaagtagaggtccagcagttccttggggtggtgcccgcggagggagcccttcagcagatggacgattccacgggcgagcagaagggccacaccgaacatgccgcccagcaccagagagaagagcagcacgagattgaggctgcgctggagaatgtcggcccggaagatggccgcggtgacaaagccgatgatggagccagacccgtcccggaccgcatggaaagccacccgctggttgccgtgggtgccgtagccggtggtgatatagggcggggagccggacaggatggcagtctcctccccggctacaaaggtctcgccggtctccaggcggctggtgtggtaaaagcgcagaccgtttcggtcatagacagcaatgatgtcaatgccaggaaaattctggtgcagggaatccagcgacccggtgacctcctgggtgggatagccattcgccagcatctccgccacgccatccatagaggccacataggcggcggtgctggagatggtggagtcgatgctctgactttggcgggcgatatcgaaatagagggtgatccccagagagagcatcaggagcagggcggagacagcagaaaagctgaggaagagctgccgctccagggagaggcttttgatcttttgcagcatggagtcacctccgcgatcgagggtcggccagggtcagagctggttccggtcccgaagccagctggggagggtcctggcccggatgctggagacgatgcccatggcggtgtaaagggtgatgatggaggagccgccatagctgaaaaaggggagcgtgagccccatgacaggcaggatgtacaggcacatgcccacattgaagaatacctgggccagcagcatcccggcgatccccatggatacataggcggagaagggggagctggcgttccggcccacccagtaacaccgcaggatgatgagggccaggaccaggagcagcaggaggcagcccaccatgccaagctcctccccgcagacggagaagatgaagtcggtctgtcgggcagggagagcggcactgtatgatgcctgagtctgggtgccgttgaggtatccctggccggtgagctggcccgagccgatggccagcagggaacggctctgctggaagccagcccccagcggatccaggctgtggtccaatacgaccataaaccgattgcggatataggcgaagcggtcactctggaggatggtgaaccaggccccaagaatggcacccacgaagcacgtcccgcccagagcgaaccatcgagccttcacccccgccatccaggagatggtgacgaagaggaacagatagatgacgcacataccgatgtcaccgcagaccacggcgatcagccccaccatcagcagggtatgaccggtgagctgggccacggagaagggggagctgatgtcccgctcctgctggtggatgcgggcggcctgccaggccagaagcaggataaaggggatcttgacgatctcgttgggctggagatccaaggggaagtgggggatgatccggtccagggcgagccagttccggttgccccccgattcctttcccaggggggtcaggagcaggagaatgaagcccacatcaaaggccaccagccacttccagcacttctccacgaacagctggaagtccacaaaggtgaggacgatatagatgaccacgccgatgcagatggcgacggcctggacgatcacgttccgattattattatcgagatagcgggtggcgctgtagatcagggccaggccgtagccgctggccgtgagacataggaacagaaggagcacatcgcccttcttgaaaaactcccggatgggggaaaacagggtggtcacgttgtcacctcttcagtagggggaaatattttctttcaaattgttattttaccgcctttgtgtgaaaaagtaaactgacagttctgaaaaaagggcggttgggaccgcgtttcctcccggcatgtggagctgcgggcgggaaaagcatgaggacggcggaaacatcactggaaaagcgtgggggacctgtgttataatcggaggcgagaacgtggagccgcgatgtccgcggggagaggagcgagcatggaatttgtgaccaacagccccgaggagacggaggagctgggagaacggctggggcgtgccctgtccccgggggatgtagtggcctttaccggggacctgggggcgggcaagaccgcattcacccggggcatcgcccgggggctggggatcggggatcgggtgaccagtcccacctttgccattgtcaacgagtatgaaggggggcggctgccgttgttccacttcgacatgtaccgcctgacctcctccgacgagctgttcgacatcggctgggaggactacctggcccggggcggcgtgtgcgccgtggagtggagcgagaatgtggcggacgcgctggagcgggacactgtccgggtggacatccgccggggcggggaggagagcaggcgggtgatctcggtggagcctgtccccgccggattttgagcagagaggggagatcgacgatgaaaatactggcccttgagacctcagcggcggcctgttccgccgccctgtgccaggacgggaccctgctggcccagagctggcagaacagcgggctgacccacagccggaccctgctgcccctggtggacagcatgctgaagaactgcggcgcgtccctgaaggaggtggaggtaatcgccgtggcggccggccccggctccttcaccgggctgcgcatcggcgtggctaccgcgaaggggctggcctggccggaggacaagccctgcgccccctgctccaccctggagtccatggcctggcctttggcccacctggaggggcgggtcatcgtgtgcgccatggatgcccggcgcagccaggtgtacaatgccctcttcctggccgcaggggagggcctccagcggctgacgcccgaccgggccatcggcctggaccagctgggggaagagctgaaaaaggtggaaaaagagaaaattgtagttggagacggggccaggctgtgctataatactttaacagagcagggtatcaccctgaaaatggccccggagcatctgcggatgcagagcgcctggggtgtggcccgcgcggcgctggagctggtccgttcaggcggactggtctccggagaggagctggcccccgtgtactgccgtctgtctcaggcggagcgggagcggctggagcgggaagctaaatcaaaataaaaaggggagcgtttcagatgtttgacagcaaagtccatgttttggatcacccgctgctccagcacaagctgagtatcctgcgggacgagcgcaccggtgtgaaggagttccgggagatcgtgtccgagatcgctacactggagtgttatgaggctacccgtgatctgcctctggaggatgtggagatcaagactcccgtggccaccggcaccttcaagtgcctgacggggaagaagctggccattgttcccatcctgcgggccgggctgggcatggtggacggcatcctgacgctgatcccctccgccaaagtggggcacattggcctgtaccgggacccggagaccctggcaccggtggagtattactgtaagatgcctcacgacatcgccgagcgggacgtcatcgtcctggatcccatgctggctaccggcggctccgccgtggcggccatccagttcctgaaaaactatgagtgcaggagcatcaagctgatgaacatcctggccgcccctgagggcatccaggcagtgcgtaccgcccatcccgatgtggacatctatgtggccgcggtggacgagaagctcaatgaccacggctatatcgtccccggcctgggcgacgcgggcgaccgaattttcggcactaaataagtatcggatacaggcaaggcggcgggcccctctggcaggaagggtccgccgcctctgcactgttgtcattttctggggtgctggggatgaaagggagacggcgagggaggatttgacaggggcgcggaattcctctataatagtaaaaaactgcaaaaggaagcggcccgagccagagagaggccgaaatggaggagcatgtgatggacatccatgtgggagatgtgctgaaaatgaagaaggctcacccctgtggaagccaggagtggctggtcctccgggtgggcatggattttcggatgcgctgtctgggctgcggacacgaggtgatgcttccccggaacaaggcggagaaaagtgtccgaaaggtgtatcgggacggcacggaggtcaaactggaggcgcgcccggcaaagggcggccaaggaggaggggaagaggcatgaatcaacgatactggagcagccggatccagggactggtgccctacacccccggggagcagcccaaggaccggacgttcatcaagctgaacaccaacgagaacccctaccccccttctccccgggtgctggaggccatccggcgggaggcggatcagcgcctgcggctctatcctgatccggagtctgccgcgctgcggggggcgctggcggagcactatggcgtggagccggggcaggtgttctgcggcaacggctcagacgaggtgctggggctgtgcttttacgccctgttcagccccgggcggaaggtggtgttcccagacatcacatacagcttctatccggtctataccgagctgttcgggctggactatgaggagatccccctcaacgaggacttcaccctgccggtggagcgctttctgggggggaacggcggcgcggtgatctgcaaccccaacgcacccacgggccgggccctgcctctgtctgacatccggcggatcgtggaggacaacccggcagcggcggtgctggtagacgaggcctacgccgacttcggggcccagtccgctgtggagctcatcgaccagtatcccaacctgctggtggtccgcaccatgtccaagtcccggtccctggcggggatgcggatcggctacgccctgggcagccaggacctgatcgatggggtgaactgcgtgaagaactccttcaactcctaccccctggaccggctggcccaggcggcaggggaggcggccgtgcgggacacggcatattttgaggagacccggggcaagatcatggcgacccggacgtgggtcacccacaggctgcgggagatgggcttccaggtccatgactccagctccaatttcctgttcatcgcccacccggaccactccgggcgggtgctccagcaggggctgcgggaccggggcgtgctggtgcgccggtttgaacgccccaggatacaggaccatctgcgggtgtccatcgggacagacgaggagatggaggccatgtgccgggctatggaagagattttgaaaggacagtgacccatgcgatacgacagtgacctgctgtaccgtcccccaggggagtggcgcagctatctgctccagtgcaccatcgggtgttcccacaacaaatgcaccttctgtgccatgtacaaggagaagaagtttcgggtccgcccggtggaggagatcctggaggacatcgacatggcccgcagctactacgggcccaatgtggagcgggtcttcctcatggacggggatgccattgtgatgaggacggagcagctgctccagatcctggagaagctgtatgctgccttccctaagctccagaaggtgaccacctacgccggccccaggagcaccctgagcaagacgccggaggaactgcgcgccctgcgggaggccggactgacccgggcctatctgggggtggagagcggcagcgacgcagtgctccaggccatccaaaagggctgcaccgccgcggagatgctccaggcgggccagaacctggtggcggcgggcatcgacctgtgggcgatcgtcatcctgggcctcaccggccaggggggcgactgggaggagcacgtcctgtccaccgccggcatcatcaacaaaatgaagccccgccacctctcagccatgacttttgcccctgcggcgggcaccccgctgggggaggacgtgctggccgggcgctttcaggtgtgtaccccggaccagatcctggaggagtgccaccttctgctggagcacctggatgtggaccccctccacttcaccagcaaccacgcctccaactacctgcccctgaagggggggctgccggaggaccgggagaagttcctctccctgatcgaccaggcgctggaaggcaagatccgcctgcgcaagaccctgaatcgggggatctgagatgtcccgaaagtgaagaccgccccgccggagcctttggttccggcggggcggtctttatcggttcagcggcggcggcgtcccagccataggtccgtcccgataaggatggcgcaccagagcaggatcagccccccgatgagcagagcgcagttgcggaaaaagacctccggcagaatcaggatgatctggtccaccgccgggtcgaagagccagttgtccttccccgggaagaacagggcgtggaataccacaaaagcccgctcaaagtccagggaggccagcaggcccaccacggcgaagacgatgcccagccccgcggcagcccagaagccggggccccggcccagaagggggcggggccccaggcccatcctccggcccagcaggaaccagaggagcaggagggcggcagacaaggccagcacggccagatccagcaggaagaggacccgcacatcggcaaaatggtcccggccggactgtgaccaggacagcgcgccggtggagaactccggggcgcccaggcagaagtccagcatctcgtcataggcctggcggatcgcctcctctgtcaggccggtagcctggaccagccccaaagggccgatatgggcgtaatagaaagggcggcagaggatggggaccgccacagaggaggagagcacgaggcaggccgtaaggacggccagcaggacggacaggatcttactctgtttcatcagggacacctcccgtagggatgaccagaccggacaggacgatgagcacctgcccggggaggtagaagagccacatccctacctgggccacggaagagagggggggagggaagaggctggggaactgagagactgcgaccagcatgtcgcacatgaggtagaggagcagtcccagggagaagaggcggcccccggcgtcccgcagagacaggctcagcagggcgttgaagaggaagtgggagaagtagagggccgcggctgcggtctccggtgtgaagagctccagctggtacagggccaccagaagcagggagaacagaaggaacctgggaatgagcagggcatggcctccgttggccttacagatgcggaccatatacgcaacctggaccccgtaaaagaggaggatgcccaggaggtaccagcggtccagcaccagcaggaagaggtcggccgctgcggtcatggccagcgcggcggccaccaggcggtctccgccccgggaagcccccgccagggccatgagcaggcacagcagcagggcggcatacttcagggcggtgctcagaggaccaggagagagcaggtccagggccaggaaggagaggtagagcgccccctccagcagcaaaaaagccggcacgctccaccggcagagccgctcgatcagaatgttctcctcccttccacaaaggctgtcccgttcagtgtagcacgaatgagaaaaaaatacaatccttgtcaacagaagaggaccgcagcgcccggaaaaaggcactgcggtccttgctgatgtcgtgaagcaggatggaaggttacttcgcggcggtgtttttcttcttgccgaagatggtcatgcagccctcaacagccagaacgatagccaggatgaacagcagcacgcccaggatggcctgcgcatagggggcccagtcggtggcagcgccggcggtgatcttgcccacctgagtgctgatggtctgagccagggaagtcagggtgacgatcagcatgaagatcatggggatgtagaacatcttgttgttcttgccgatgttgcccagccaggcacagacggccagcagggccagagcggccagcagctggttggcggcgccgaacaggggccagatcttggagtagccggtcatgcccagacccacgcccagcaccacggtgatggcggtggcgaccacgggattggtgaggatggccttgaagccggtggcctccttataggtctggccgggcttcagccagaactcctggaacatgtagcgggccagacgggtggcagtatccagggaggtcaggcagaagacagatacggtcagcaccaacagggagctgacggtggcctgtgtgcccgccagaccggggatggaggcgatcatgcgggaaatgccggtggcaaacacctgggtgggggtgacgatctcgccggaggcgtactcggcccagatgaaggacacagcacacagggagaccagggccagcgcacactcgatgagcatgccgccgtaggcgatgggcttggcgtcccgctcgtggtccagctgcttggcggtggtgccggagcccaccagggagtggaagccggagatggcgccgcaggcgatggtgacgaacagagcggggaagacatagcccagggaggtgccggtgggcgccaggctgtcatagaagccggtgaaggcgggcatatccatgtgggcagcgtccgcaccagtgagaccggccccgatgacgcccacagcggcgatggccatcatggcgtacagcaggaaggaggacagataatcacggggctggagcaggatccacacgggagccacagaggccaccagaatgtaggcgccgatgatccacatccacacggagttggacagatagatggggtgccagttcaggccgatgagcaggcagatcacgatgcccacgcagccggcaatggtggccactgccagggaggccccgcggcggtagacaaagaagccgaacaggacggccatgacaatgaacagcagggagatcatggccacggacgcgttagtggcagaggcggcggtgtccagcacgccgtccacataggtggcctggaaggtgctggccacgatggaggcgaaagcggccaccaccagcaccagggtcaggtaggaaaagatcaggaacagcttcttggcacggtcgccgatgttcagggcgaccacctcgccgatggactggcccttgtggcggatggaagcgaacagggcaccgtagtcatggacggcgccgaaaaagatgccgccgatcagcacccacagcaccacaggcatccagccgaatacggcggcctggatggggccgttgatggggccggcgccggcgatagacgaaaagtggtggcccatcagcaccggagccttggcggggacatagtccatgccgtcctccagctcatgggcaggggtgggccgggagtcatccacgccccactgcttggcaagccatccgccgtagaagatgtaacctacgatcagaatgacaatgccaatggaaagaactaacactgcattcatttaagtttctcctctccttaacttaaatttctggatctcgcgggccacaagaccactcaggctcttccccagatctttgccgctgcggttcgtggcgatgtcgccggtggacaggtccaccgctgctatacgaaactccatccatccatggagcgatagcttaaagtcccggtgcttcttcagcttttgaagctgggccagagcgtccgggtcggcctgatcacacaggaccacggccgacagataggtgcacatatgctgggaatgggggcggatgcgtggcatcccgtcctccagcgtgcgggcctgaagctccaccaggctggtgaagtccagccgggggagggagtataggtagaggtattcgtgggtctccgccgcccacagctccgcctttttgatcagtacgtactgagagccgcgggagtgataggcgcacagtgctttcaggggggagccgtcttggacgggctctacgtcaaaataggctgtgtatgcctccgagaggcgggcgaggagggtatcgcgcagttcagacacaggggacctcatttccatggggcgccataggcagaacagaagcggaaaccgattcccgctcccgcccaaataaaccccaaaattatgaataaaatgttaaaatcatgatagcagatttccacatattttgcaaggaaattcttcaaaaagggaggaaagaaatgaagatcctccatcaaattcttttgattaagatagaataaacaaaaaaataaagaagaaggagaagaaattgtgcagaaaaccgcgggatgggagaaaaaagaaaaaaagggacagcgctgtgcaggattaccgccgttttttataggggaaatatggagggcgtggggagaggggagacgttccggggatttgacagcgggtgcgggattgagtacaatgggaaatcatgcgccaggccgcgccggcccccggagagaggggggcgcggagacggacagggcgctcttcccaaaagtgagtcccgcgagcggaggttgtctacatgagttgggaaagaatgactgctatgggcccggcgggggagaacagatggagccgttggcggcggctgctggtcccgtccctgttttttgctggggtcatctactatgaagaactgtttttgaagctgttttgtttccacgccgtcacgccggtgggggcgctgttcaccctgttgttcaccctgcccatcgcgatcctgctgggactgctgtgcggcggggtcgccccacgaaaggggcgggtgctgctgccggcaatgaccctgctgctctccgtgtggatgggagcccagagcatctattatcacctgttcaagaccttcctcacagctttctccctgactaagatggggatggtggccggtgctttcggagacatggcggttggggagatcctgctcaactggttccccatcgccatgatggcggtccccttcggactggcggtggtcttccgccggcgtctgatcccggaggagggccccatgtccagaaggatgggggtacggtgggccctgctggcggcggtggtccagctggctgccatgggcatcgtgatgtgctgcggcgggggctccatgtccctgcgcttcatctatctccaggcggcggtgccggaactggaggtgcagaactttgggatgctgacccagaaccagctggagctgcgcagagtgctcttcgggatcaccccggaggaccagagcctccggaaggggcaggcgctccacctctaccggccggccagtgagccggtagaggtggagtccgcggagtatctctccgcggactatcacatcttggacatcgatttcgaccggctgatagcggaggagacagacgaggacctgctccagatgcacacctatttttcccagcaggtgcccacagcaaaaaatgagtggacgggctattttcaaggaaagaatttgatctggatcgtggcagaggggttctgtaccctggccatggacccggagcgcactcctgtgctctatgagatggcccactctggctttgtgtttgaccacttctacacccctctgtggggggtgtccacctcggatggggagtacaccaccaccacggggctcatcccaaagtccggggtgtggagctactcccagtccgcaggaaattacatgcccttcggttttggaaaccagttcagccagctgggctaccggacgatggccttccacgactacctctatacctactatgaccgggataagtccttccccaacatgggctatgagtactatgccctggggcacgggttagaactggaagagatctggcctccctctgacctggagatgatggaagagatcgttcccatgttcgtggacgaggagcagtttatggtctactgcctgacggtgagcggccatctgaactacacctatgaggagaacgccatgtcccgcaggcactgggacgaggtggctggcctgccgtacagcgaggggcccaaggcatatctggcctgtcagatggagctggaactggccatggagagcctgctcacccagctggaggaggcgggcaggctggatgacaccgtcatcgtcctttcaggcgaccactacccctacggactgaccgacgaggagtacagtgagctgctgggccgtcaagtggaccccaactttgagatattccagaacaccctgattctgtggaacgcccagatggaggagccggtgcgggtggagaagctttgctccagcctggatgtaatgcccaccctggctaacctgttcggcctggagtatgactcgcggctgatggcggggcgggatatcctgtctgacgagcccgggttggtgatcttctcgaattacagcttcctgacagaggagggggcatacaactcagtgctggatgagttccggtcctgggacggctccccgccggacgaggcgtatgtgcagagccagatcgccgaagtgcagaaccgggtggcctattcggccatgatcctggaccacgactactaccgggtggccctgaacgggccgcccagggaggaaggctccctgttcagtgcccatcgggagccccagccggactccggctggctggactgaatcccaaaatgcccggcccactcaatgcgttgagcgggccgggcattttgtatgatgggaaccggaccatagatgggggccggagagtctttggtctgtctcccgggcaggctgttgtccgtgcgggagacagtgggcgcaccgccgtgcgccggaggtgagacgcagcccggggagaacgggccgcatactcggggttgggaggggatggagccctccgtggattctggaaggggaaagccggatcgctccgaccacccatagaataccataccaggagggaaaaacatcaagaaatttgagacaaagcgtgaacgaattgtaaattgctatggaagaaaaaggacccagccttccggctgggtccaatggtttttttgaagggagctgagctcaggagagaatgcccaaatcggtccacaggtcgttgtagagggtgcgggtgtctaccgggcgcaccagataggcctcgcagcggtccagaacctcctggggggcagccatgatctcatagcgctccatgtccaggggttcgccataggtctcctcgtagtagtcgggataggaatccagggcctcctgattgggggaggcgtaccagatatagtccatatttttcaggctggcatcggtggaagccatgaagttgatccactcatgagcctcatccacattctctgcgttcttaaggatacacatggcatccacgaaccagttggagccctcctcggggaccacgtagaccaggtcctcattgttctccagcatgctcaggtagtcgccggcatagtaggtggccacggcggcctcgccggcctccatcttgtcgaagacctcgtccatgacccatgcctgatacacaccggccttcttggcctcagcaagcagatcgtaggcggcccgcagctcctcctcgctgtcggtgttgacggagtagcccagatccatcagtgcgatgcccagggcatcccgggagttgttgatcatcaggacctggtcggcatactgggggtcaaacatggcgtcccagctggtgatgggctggtccaccatggtgctgttgtagatgatgcccagggtgccccaggtgtaggggaccgtatagagattctccgggtcataggacaggttcttgaaccggtcggcgattttggaaaagttggggatcttgtcgtagtccagaggctggagcatgtcctcctcgatgagctgggagatcatatagtccgaggggacgatcacatcgtagctggtgccgcccagagtgagagaggagtagagctcctcgttgctgggagaggtctggtagttgacttcgatcccggtcgcctcctcaaactgctggatgaggctctcatcaatatattcaccccagctgcacacgttgaccacccgcttttcggtaccggagccggagcagccagccagcaggccggcggacagggacagggtaagaatgagggaaaatgcttttttcaatggatcattcctccaatattctatggttttctattttcacggctgaaggccgcaaaaatcagcggcggagcttcctggccgccttctcctgactggcctcccgcaggttgatgacgatcagcaggatgagcacggtggcgaacagcagggtggagatggcgttgacctccggactgatgcgttttttggtcatggcgtagatgcgcatggccaggttggcggtggtggagccggcggtgaagtagctgatgacaaagtcgtccaccgacatggtgaaggcgatgagcaggccgttgacgatgcccggcttgatctcaggcaccaccaccttccagaaagcctgcatccaggtgcagcccaggtcctgggccgcgtccaccaggttcttgtccatctgccgcagcttgggcatgatggacaggatcacataggggatgttgaaggtgatgtgggcgatgagcatggtgccgaagcccagatagagcttggtgggcagatcggtgcccagactggcgttgatccactccgcagcctgtccccacagggagaaggctgccacaaagaacagacacatgctcacaccggtgacaatatcggcgttgaccatgggtatattgttgatggtcatcagggggccgcgccagcgccgcttcatgttgtagaagccaatggcggcgaaggtacccgccacggtagcgatgaccgccgccaggacggagactgccaaggtggtgtagaaggcgtccaggatcaggtcatcccgaagcagctcccgataccagtccagggtaaagccggcccataccgagcggctgctggagtcgttgaaggaaaagacgatgagtaccagaatgggggcgtaaaggaacacaaagaccagcgccatggagaggcggcggaagagagaggcggaacggctcatagcatcaccgcctgttcctcgccctcaccgaagcgattcattaccgacatgcagatgaccacgatcaccatcatcaccagcgccacggcggagcccagataggggttataggccgagcccttgaactgcatctcaatcaggttgcccagcagaagatgcttgccgccccccagcagatgggagatggcgaaggtggacaccgcagggacgaacaccatggtgatgcccgagaggaccccaggcagggacaggggcagggtcacacggcggaacaccgtgaccgaatcggcccccaggtcccgggcggcctcgatcagccggtggtccagcttgacgatgaccgagtagatgggcaggatcatgaagggcaggaagttgtacaccatgcccagcaccaccgcgccctgggtgttgatcattttgaaatactcgatctccgtgccaaagaggccgttgatgaggtcgaacaggccgatagcgtcaaaaaaacggttgagcaggccggtgttctccaggatggacatccaggcgtaggtgcgcagcaggaaattcatccacatgggcagcatgatgagcatcatggccacccgctggaagccggctccctcccgggccaggaaacaggaaatggggtagcccaccaacaggcagatcacggtggcgatgagggccagcttgaaggaccgggtgaagaccaccgcgtagtcccagatgcgggcgaagttgtccagggtgaagccgcctccggcggaagaaaaggcatagaccaccaccatcagaatggggatgaccacaaagatggccatccagaccacataggggatggaaaacagggagagcttattccgcttcatctccggcctcctccccctctgcctcctcggggtcataggcggcgtcgctgatctcgtcatactcctcgctgtaagaggagtagtctccaaacatgccggagtaatggctcttcttcatcacgtggaagccgtcgggatcgatcttgatgccgatacggctgcccaccggggacaggtccgtggtctggatcagccatttgaagccatagaagtccacgatgatgtcatactgcatccccttgaaggtgacggaggtgacggtccccttcagctggccctgctcctctggcacgatgtccacatcctcggggcggatgaccacgtccaccggctcgtttggggcaaagcccttgtccaggcactggaaacggcggttgaagatctccaccacgccatcggtgcgcataatgccgtcgatgatgttggactcgccgatgaagtcggccacaaaggcattctgaggctcgttgtagatgtcctccggggtgccgatctgctggatctgccccttgtccatcactaccaccgtgtccgacatggacagggcctcctcctggtcgtgggtgacatagatgaaggtgatgcccatggcttgctggatgcgcttaagttcgttctgcatgtctttgcgcagccgcatatccagcgcccccagaggctcatccagcagcagcaccttgggacggttcaccagggcgcgggcaatggccacccgctgctgctgtccaccggacagggaagacacagagcgcttctcaaaccccttcaggttgacgacatccagcatctccatgacccgctcctggatctccttctcagtgagcttgactttttgacgacggatgacctttcccttctcgtcccgctcctccttcgccttggggatgcgcaggccgaaggcgatgttttcaaagacgttcaggtggggaaacagagcgtatctctgaaatactgtattgatggcccgtttgtacgccgggacagcattgatcctcacaccgtcaaaaaatacgtcgccagcggtgggcgtctggaaaccaccgataatgcgcagagtggtggtcttgccgcatccactgggaccgagcagtgtgaggaactccttgtcatggatattcagcgtaatgttatcgagcacgacctcgtcgtcaaacgccatggtgcagtccaccaggcggatcaactccttggacatgtatcctcccccatttcctttcaacttacagcttgtcagctccctcggtctcattcccgccgctgtccgcagcagagggacagctggaggtcccggcggggattcacagatagcgagatacactatatccgcttaccgataaaatgtcaatggattttgtcgaaaatctcggtgaaatccccccgccggaaaaccgggaaagcccggccggagcaaggaaaactgggggtgcgccggagtgaggggagatcccggcggaccggcggggatcacagggaaaagccgggaaaatattccgtcacgaagtccacctgctccacctggaactgctgtccgtccagaggagccagcgccccggcgtcggtagtgaagcagaactccagccggtaggagtacagggcctgatagctgcggccgtagcgcttgttctgccgctcgctgccatatttgccgtctcccagcagggggtgcccggcggcggcgaactgggcccggatctggtgggtgcgcccggtgatgagctggcagcgcaccagggagagcccgttccggacggctagggtctcgtacagtgtgacggccgtcttggcccccggcctgggacgactgctcacggtgacctgtttttttgcctcatctttcagaatgtagccctccagccggcccgcggggcgcgggagagttccgtggactatgcagaggtagtattttttcagctcacggtcccggatcttctggttcatcacccgaagtccctccgccgttttggcggcgatgacgatgcccccggtgttccggtcgatacggttgcacagggcgggggcaaaggccccctcctggtagggggaccactcctttttctggtagaggtaggcctggatgtgggtgatgagtgtgttgacccgctccgtctcgtcggggtggaccaccaggccggggcgcttgtccactagaaggatgtgctcatcctcataaaggatcgtgagtttgggctggtagagggagagaaaggcgttttccggtgtgggggtctggaaaaactcgtcgttgatataaagctggagcaagtccccctggaccagacgcacgtcccgctttgcccccctgccgttgagcttgacccgcttgagacggatgtacttctgggccagcggggcggggaggagggggagggtcttggccagccagcggtccaggcgctgtccagcgtcgttcgttccaacgataaattccttcatggggcaagtcggtcccttccacagtattgagcgtgtgatatcctgccaccattccaccatattcttgtttttttgtcaatcccgatttcgcccggcgggccggcggggcgccgcaaaaaaattttttcctcaaatgcaaaaaagtatttgacattattccccgatttgtttataatactcgctgtaccattctgcgagtatggggtccataccccggagggaggttccatatgcggctggatctgaaggacatcatccacgttccgggcgcgtccaaggacttccaatttcagctggacctgtcccagctggagttttatggctcccatcccatcagccggccggtagaggccgcgggcaccgtgaccaaccacgccggggccttggagctgacgggcacggcccgctcccttctggacctggcctgcgaccgctgcgggaagaaattttcccgggaaaaagcggtgcctttggactgcctcctggccgatgagctggaggacgaggagaacgacgagatcgtgctcctggagggcagcgaggtggatctggacgagctggtgaccacggctttcgtcctcgcaatggatacaaagaacctttgctcagaagactgcaaagggctgtgcgccaagtgcggagcagacctgaacctgggtccgtgcgggtgcagacctgaagtggatccacgattggcggcgcttgcgcagctgttggatgatgaaaactgagtagtccgagaagtgcctgcgggagaaacgcagggcacgtaaaccgaaggaggtgtcaccaatggcggttcccaaaggaaaagtttcgaaggccagacgcgataagcggcgcagctcccactggaagctggagactcccggtatcgtgacctgccccaagtgcggtgcctatcggctgccccaccggatgtgcaagtcctgcctgacctataatggccgcgagttcggccaggtcgaagcccagtaataaaaaaagacgctgtgtgcaaacacagcgtcttttttttgtcctgctggctccaacaaaatttccccctggattttgcatcggggagaaggcaggaaagtttggaaggagtggtacgcctgaaagagaagaaacagatcccgtggagacgctggaccggacaagcgtcaaaagagatgagatcctgctgggaggcagttttctatggggaaaactgggaggatccagactctggggacaacaaaagggtgctgagcaatgaaaaatttcttgaaatcccggggaaatgcggtacaatggtcttatatgacaaacaaaggaggtcccccaatgtccgattgtctgttctgtaagatcgtcgcgggagagatcccgtccaacaaggtgtatgaggacgagcagtgcttcgccttctatgacatcgatccccaggcgcccacccacttcctggtcatccccaaggcccacatcgcctccgctgccgaggtgacggcggaaaacagcggggtggtggcccacatctttgaggtcattgccaaggtggccagggagctgggactggacagctaccgcatcgtctccaacatcggggagcaggcggggcagagtgtaaagcatctgcatttccatgtactgtccggccgggatatgacctggcctccgggctgagaggagccccgagacggatctttgtaaaaagggcctgggcggctgtgcacagccgcctaggccctttttagaatatcctacagagaacagttgcaaaagggaggcgtttcctttatgatagaaggaaagaggccgcaggccgagatgcggagaacggctggggagatttctcagactgggtatcgatacgaaactgcaaggagaccaatatgaatatcatcaagatcatgactcccaaggctctgaccgtgtttttgcatacaggggacacggtgcgtcagggactggagctgctgcggcagcatggatacaccgccatcccggtgctgaatgaccagggagaatacctgggcagcatcacagagggggacttcctgcgtcatattttggccgtgggtaccaccgacaggaaggctcacgagaagtaccgcatcgggggccttctccgcccggacttctgcccgccgctgggtatccgggccactccggatcaggtggcccaggcgcttctgcggcagaacttcatccccatcgtggacgaccggaactgcttctgcgggatcgtcacccggcgctccttcatggccttccttgtggagcggacagatctggaggagctggaggcatccccggtgtaaagagaaaacctctgtaccgtgtggtacagaggttttttgtcagccttattccaatcacacagcgcgggtgaccttaccggaacggaggcatctggtgcagacgtacacgtgggtaggagtgcccttcacgatcgccttcacgcgcttcacattgggcttccagacacggttggaacggcggtgggagtgggagacctggatgccaaaggtgacgcccttgtcgcagaattcgcatttagccatgttgcttacctcctcgctatgagagtacgcttatagaagcatcgactgatataataccagatgttgcgtgaaaatgcaagagtttttttcaaaaactccgcttattctcaggagtggaagggcaggggcggcctgtggccggccgcccctggaaattttacgggcacgctctggcagttttgacgaaaaaggagagggcagcatctcctgcctgtgtaaaataggacaagaaaaaacagctgttctcttgcgtgccgggtggaaatgagctatactaatccagaaccagaatataggagaggggtgcaccctgtgacagagacccaaaacagcgtccgtctgggcgagatcatcaaggaattccacctggagctcctccacgagggagaggactaccagaatatcccgctgcggaccctggacgtaaaccgccccggacttccgctgtccggcttttttgagcattttgacaccaagcgcctgctggtgatgggactgaccgagactacctatgtcagcggcatgagtgaagagcggcgccgggagagctttgaccgactgctctcctacccggtgcctgccctgatctatacccggggcatcgacccgttcccagagtgtatggagatggcccagaaatacgggcgcaccgtgctgcgcacccaggagcagacctcggcttttatgagctctctcatcggcagtctctacaaccatctggctccccggatcacccggtcaggcgtgatgatggagatctacggcgagggggtgctcttccagggagagtccggcgtgggcaagagcgaggtggccatcgagctgatcaagcgcggccaccgcatcatcgcggacgacgcggtggagatcaaggagaccaaccatggcaccctggtggcttccgccccggagctgatccgccactacatggagctgcggggcatcggggtcatcgatgtacgccgcctgttcggcatgggggccatcaagatgaatcaggagatcgatatggtcatcaagctggagccttgggatgacaccgcagtctatgaccgcctgggcctggagaacacctacaccgagatcctgggggtgcagctgcccgccctgaccatcccggtgaagccgggccggaacctggccagcatcgtggaggtggcggccatgaacaaccgcaaccgcaagatgggccacaacgcggcgctggagctgaccagaagaatggatcaacattttgcccggaagatgggtgtgggagatgaatgagatgtatatcgggcttgacatcggcggcaccaacatggtggccggactgaccaatggagcgggaaagatcatcaacaaggtgagccgtccggtgaacaaggcgtgggacccggcagagctgtgccgccagtccgcccagctggcccagcaggcggcggaggtggggggcttcgccgcagatcagatcaaggcagtgggcctgggcctgcccggtctggtggacaacaagacgggctatgtgatccagactcccaacatgccctttgacaacactcccatccgggagatgttccaggcggagtgggacgtgcccgtctatctgggcaacgacgccaactgcgccgctatcggtgagtactgggccggcgcggccaaggactgcgaccccgcagtggtggtcaccctgggcaccggcatcggaggcggcctggtggtgggcggcaagctgtacaccggcttcgcccagtccgggctggaggtgggccacatgatcatccggcccaacggcgtgctgtgcggctgcgggaaccggggatgctgggagcagtacggctccgctactgccctgatccgtattgcccaggaggccatggagcgggacccgggcagcgtgatgtgggagctgtgccagggggaccgcttccgcgtggacggacgtatccccttccaggctgcccggctgggggacctgtcggcaaagaaggtgcttcaccgctatcttgaggggctgtccatcggcctgatcaacctggtgaacatcctccagccggagatcatctgcctgggcggcggcatcagcaacgcagaggacgacctgctgctggaccccctgcgggggctggtgctggcgggctgctttgacaagtccaagccgccgcgcctggagagagcctccctgggcaacgacgccggagtggtaggggctgccatgctgtacaagatgctgtaagggcccggctcccggccgggagagcagcggtggaacaagaacagggcggcctccgcagatgcggaggccgcctcggcttgtggaaaaagctctcctgtgaggaattccgccacccgcaggcgacggaataaaagtttgatttcgtcatttccaagggcgtgtacctcgggaatgacagtctctccgcccattgcctggctggctcctgagaacgtccgggttcagaggacaaaatcctcgtccttcagcctggagaaatccgccttagccgggcggggagggacccgtttcaatgggtcgtacttgaaggatcggcagctggaaccggcagacatgacccccttccggtcgcagatcacctgatcctcgctcagggcgcgcccacgggcgcagtaggtgcagcggggttcgatctttttttgaaacaggcccatgaaggtccctcccaatgcgttgttgggaccattatactctctttggcctgggttttccactgctttttttcaccatatagacggccagtgccacaaagagcagccagacgccccaggcggccgcggtggagatggttagggcacgctgaaagtccaggctggcgatgccctccacctgttccgccaggtaggaggagaccggcgcctccagggggaagcggcggaccagcagggcagtgaaaagggcggagaggccgccatggagcagcttgccggtgagataggtccgcagggacaggccgctgtctcccagaaaggccagcacctggcagtggacagagaggccggcccaccccagcatgaaggcggccatggacagccggccggtcactgtgcccgctccggtgagggaggagaccccggaggagagctccaacaggccggtgatgagccgctgggcccatgcctgatccagccccaggggggagagcagagcggccgccccgccggccagagcgcccatgacgccggagagaaagagcatccggatgaccaccgtgaaaaacagcacgaaggcacagatgttcagggtggaggacagggccccggtgatggaatgggtgaaggccacggggaagctggctgcctggaactggggggccgcatgtcgtcccggccggggtccctcgccgggccggtagaagcggaagagcaggcctacgcacagggaagcggcgatatgtgccagatagaggagcagccccgcacggctgctggcgaagatcccggtgcccaccacccccaggataaaggcgggacctgaattgttgcagaaggccagcagccgttctgcctctgttttggagcactggccgttctcgtatagggcgatggcagtgcgggcccccaccgggtagccccctacaaagcccagggcgagggcggaggagcaggcgccccccacccggaacaggggggccatgaccccctccagcagacggcccaggtagcggctcatccccagctctaccaccagggaggagaggacaaagaagggaaaaagggaggggatgatcacattgccgcacagggccagcccgtcccgggcggcggccatactctcctggggccagcgcatcagggccagaacagcgcacagcagagccaggcccagcatcaggtcccggtattttcttctggagaacagacggcccatggggctcacctcccggcgcagagcgggccgcacggaacgtgcgcggtcccttatggatctatatgcgcgggcagaaaaaagatgccctttttctgaaacaggagagaaaactgccccggcgcggtctcaggaccgcgccggggcagttcagttggaagaaggggcttcagcccttagtgatggtcacagcgtcgttgttggcaaaggcggaggggctgtaatagcgggtgccgtcctcggccaggcggtagtgctccaggaagtcccaggccagccggaactcctcggggtagcagttgtgctcccgggccagggtgcgggtgaactggaccagggggatgctgttgctgtccgcccaggtgtaggtgtagtagcggccgctctcgtcatagctggagcaggcggccaggaagctggcgtggtcgttgggggtgaaggtcacatccaggccgttcatcttcagcgcgccggtgacccagtcatggatggaattgttatcaccggagagccagggagcggccaccaagctgtcgatgtcggcctgaccggccagcagatagctgggcatcatgctgtcagcggtaaactgggtgttgttgaaggaggtggaggccacagcggcgaagtagtaggcctcgctgttgtgggtcagggtctggaccgtccggctgcccaaggaatggccggtgccgtacacccgggtgaggtccatctggacaccagcctgcttgctgaccacctggtccagcagcagcagggcggagcgggtcatgttgacgttgtcctcttcatcgccataaatcaggctggaggcgctggagttgcaatactcgcccatgatgagcaggacgcagccctcgtcgttggccacggcccagtagccggagcagtccataaaggtagaggcggcctgagtcataccggggaagaccaccaggacaggagcaccctcagcactgttgtttttcacagagtcggggatgtaaatcagagactcgcgggggtccaggacgccgttgctgtcatagtcgttgaaagcggagatgcaggagtacactgtaccgcccaccaagctaccggggacggagacccgggcggactccagggcccgcagctccacagtggcatcgctgccgtcatagccatcgaaggtataggtggcgatggccttgccgctctccgcggcagtccgggcagccttggtggcctgatagtagtccagacggtaggccaggttgttgctgtaagcaaattgataggtgtagcgggtgtaggcggccaggaagtcccggatctgggcggcgttcaggtcagcgccgtcctccacccggacctgagagatgccgtagcgggtattggggtcccacgtcttggcgttctggttggcatagcgggtagtccaggagctggaggagatgctttgacgatacagcccatccactgtggggacagcataggcgtcattgacgttcttccagtagctgacgctggcatccccctggggatagccggcgaagagggtgggcacagggacatccgcattggtcatgaacttcgcggaggcgatggcaccgtcgttcttcatgtcagtcagggtggcagtgaagtcctcatcgctatagccggggtgataggtgctcacgttatagccgttataggtgcgggcagcggcctggtccagatagccggagcccacgctcttgccgccgatgaaggcctggctgatgacgtacagggggttctcggcggtccaggactccagcaccgcgcagccctcgccgtagcctacatagtagttgcaggagtggccggtgaagaaggaacaggtggtgccgtcgctgagggtcaccttgccggtctggaccacgccgccgggggcggtctcacgggtgccgccggcgtcgttgccgatcacctcgcccaggcaggcctccagataggcggcctcgctgtcaggggtgccccagccgccctggccgggctccaggacaaagaggagctcgccataggtgtcggcctgctccagccagccttgctcctgaaggaaggcgtaggggtccgcaatgccgtcgggcagggctatgacggtgatgtaggcgcggagggcggcgtgctggcccacatagagcttgaaggagcggccggcggcctcgccgtcctggaaggtgtaggtgtaatagccgatgacggggtgctcattgacttcagtgcggtcgatgggcagggagcgggtctcgccgctcctgctggtgtgggagagcagataccggttgagatcggtgggcgcggcggaggccgcggaggcgcccacagacaggcccaggaccagggccattgccagaagcagggacaaagctcgtttgcgcatgatgatttcctcctcattccctcgtttgttggtgcgtgctgggcgcgggcatcgctgtcggcggggtctaaagacagcaattagacaaaatttacaatttttcctgcgctttcgtctttattatagctgttttgactgccgctttccagtgagaaattttgataaatggatgggaaaaatgcatgggatgggatgagagaggggaaggaggtcagcggggccgggaagaggaccggatggaaagggcggagcatacccggcccagggtgaagcggtacatgccatataagaacagagagaggacgaggaccaccagggcgcagttggccaggccggccagctcgccgggagtgaagctgccgctgttgaagtacaggatcatggcgaagaaggcgtagatcagcagggtgcccgtgcacagggggacgaagaacacccgggagatctgcccctttaccgtgcggcggaggaaggcgctggaggcccccagatgccgcaggtcgtcatagacccgggcgttggtcatggcgatggtcatgcagcgggtaaagaggatgactaccatagcggcaaagcagacgatggaaacaaagacgaacagcatcagaaagaccgccatggtagtggtaaagtccgcctggtccagcacccggaagcggggcatgtatttccaggaattccggaagttgctggaatcccgctggtcatattcaatgggagaaaatccattgggttccagatgggccgggtccaggaagtagtagcccttctctgccagataacggtcccggaccaccgggtcccaaccgtcgaagagagccacctcggggccggagcggtccacgatctcgtcgaacagggcccttgcaaagaagtaggtgtcctcctcgtcctccacgtcaaagacggccaccacctcccgccattcatcgggcaggccctggatgatgcgggcataatccccgtcgtccagcacccggtatcccagaagggaggtgctgcgcaggggctcggccggcgtgacggccagctgttccccggtgaggtggttggtgaccagggagatgctgttcccggcgccgctgctatccccgttgcggtcatagactgtggccgctgtaccgggttccagatccaggtcatccccggtaaggatgttccaggcgctctccgacaggaacacatcagaggcagtttcctcacagtagaccacatcgtaggtggcgcccagggggccctccgatacaacatcggcgtagccgtcgtaggcgagcaccgcaccggactgctgggcgtagcgggtgacagtcactcccatctcctctgccagatggagcacctcctcccggccgggcatgtcctggtcagcccggtagtggaacaggtaatcgaattcccggtcctccgttgtggacgaggtgccgctgctcagcatagggatatagaaagcggcaaagtaggccccggcggccagcaccgtcaccaccaccatattccgcacggtctggcgtccctggaacttcatcatgctggaggtgatcaggtccctgtagcggctgctgccccgccgccagccgttgactaccgtgtggaggaggatcatgtagaggccggccagggcgggcagatagaacagggccgtcagggcatcgggggcgtaccagtgaaggaccaaaataaaaaatttgggggccatatagcccagaaagccgcccgccgccagcaggatgatgcccagaggaccgtaccaccgggggaccgcacggatgggctcagacttccgggactcgttgaccacgtccaagatgttggtccgccgcaaaaagcggcccagcataacgaacagcatgacaaccacaaagagggagaaggccagggccagcagataggcatgggggtcaaaggccagggccatctcctctgagtccaccagcaggagccggaacccctgccagatgaaccaggccagcggggtgcccagcagggcacccagggcacaggcagacagggacatcagagccagctcccccgtcagcacccggcgcagctggtccttggaggcacccagggccagcaggatgcccacatcccgggacttgtggcggaagaacaggccggaggcgtaggtagtgaatacgccgcagcccaggacagccagcacgaagatcatggtcatctgcttgcggctgtcgcccccctcgggaaagacggagagcaccgtgggggaacccatcatggaggcgtaagcggtgatgaggagcacggagacgaaacagcacagggtgagcagggcatactgccccaggctcttccgccgcagggcggcggtcacttgggagaaacgtgtcattgggcgctcgcctcccccatctcccgcaccgcgtccagcagctcgtcctggaaggtgcgtcggtccttctcgccgcgggccagggtgcgccacacccccccgtcccgcaggatgatcacccggtcgcagaaggaggcggcaaaggagtcgtgggtcaccatgaagatggtggcctccaggtccgccttggcctggagaaaggcgtcgatcaccgcccgggaggagcgggaatccagatttccggtgggctcgtcggccagcaggagcatggggtggttgatgagggcgcgggccacggcggtgcgctgcttctctccgccggagatctccgccggatacttgttccggatggcaccgatgccgaagatgccgcacaggcggtcggcggcctgctccatgtcgcctccggtctccccggcgatgatgcggggcaggaggatgttgtcccggaccgtgaggccgtccagcagcaggaagtcctggaacacgaagcccagcttcttgttgcgcactgcggccagggtgtcctcgtccagccgggccagctcctggctgcccaggcggatgctgcccgagtcggcggggatgtagcaggagatgcagttgagcagggtggtcttacccgagccggaggggcccatcacggccacaaattccccctttgccacctccagggacacgcctttgagcacctcataggtggtcttgcctacctgatagcttttgtgcagatcttgtacagagagcatagtgatccttcctttctgctcccagcatagcaggggaggtggatgggaagcaaccgctcctgtcacagacggcgggccgggtgaaaattttggggatgggatgtcatatttgaccgctctgctgtcaaacttggtttggaagggaagcagaaatgtggtatcatactctctgtacactgagagggagaaaaattccgggaaaacaggggccgccccggcggggaggcgcggcacaaggccatgggaggtggacggtttgcttcagatcgggatctgcgacgacgcacgggaatcccgcttccagctgcgggtgctgctggagcgggcgctggaggggcggtccgcgccggcgcggctgctggagttctcctccggagatgcgctgctgggctggatggaccggcatgcgggggagctggatctggtgttcctggacatcgagatggaggggaccaacggcatggatacggccagggccctgcgggaggcagaccagagcctccagctggtatttgtcacagggtacagtgactatgtgtttgacggctatgaggtgggagccctgggatacctgctcaagcccgccggggcggaggaactggagagggtcctcacccgagcgctgaccgccctccagcggcaggaggaggagctcttcttctgccgcagcggtgaggtgttctaccgcatccggcgggacgccatcctgtacttccgctcagaccggcggcaggtgacctgcgtcacccccaggcgcgcctatattttttacgggaagctggaccaggtggctgcccagctgggggcggagttcgtccgcatccaccagcggtatctggtccgggtgggggcggtggaccgggtgacagggagcgaggtgtgggtaggggaggagatcctgcccatcagccgctcctgccagcgggaggcgctgcttgccttgacacgggcggcgctggagtagggagggaatgggaatgatcgttctgcctgtatggaaggagctgctgcaatgggggccgctcttgctgggaggcgcagccatgggctcgacagtggagcgggtgctggggccgtgccggagctggccgcgccggggggcgctgtatctgctgcttgggttcaccctggggctgcccgcctgggtgggggaccacaaccccatccttctgttcctccccttcctgacggtattcctcctgtgcggcgggggacgccctcaggcccggctggtggctggaggcatcttttatacgctgctggtccccattgggatgatggcggatacagtgctcaaacaggcgatcaacagtgtgtcgcacaacggggagagggtggggagcaatctggtgaagctggtatgctgggcggtgctggtgccggtgatctggaagctggtgcggagacctgtgcgcctgtcctcccgcctgtggaagctgctgggcgggctgacgctggcccccctgatggccaccctgtccttctccctatgggggacgggaatggtgggagacgagctggtggatcacttcgtggaggggatcgcctataccatcctgccctttgcctccctgtccgccctggccctgctggcagccctggccgtgctctcccggcacgaggagttggaggaggagaaccggctggccggactgcgggaggtgtactaccaggggctccggcaggagcaggcccaggtgcgcgccctgcgccatgacatgcgcaaccacctgtccgccctgctgggtctgctggagcggggcagctgggaggaggcggagcggtatctgcggcagctgggcggttccccagccctcaccggacacaggcgcttctgcggtaatgagaccgtggatgtggtccttgcctccaaggccgccgccctggaggaggcggggctgacgggggaatttcaggtcagcctgcctgagcagatggatatcccggcgccggagctgtgcgccctgctgggaaatgccctggataacgccatcgagggggcagcgggggcggaggaccggacggtgcggctgagggcccgggcggacaaggggctgctgatgctgcgggtggagaatgccttgggacgtcccgtaaagcggggaccggacggagcctttgtgacaacgaagggggagcgggagacccacggctttggcctggcggggatggaagagatcgcccgccgccggggcggctccctggaggcaaaggcggagggcgggcgcttccagctgacggtctgcctgcccctggatgggggaaactgagcctctggggacagcggagacagaaggcggggacagagcaagccccccggcgccgcggcgccggagggcttgctatttgtctggttcggttcaggactctgcttggtccaaatgacgcaggccggcgatgtcgctcaccggaacggagaagaccatagcctgggcgggcgtctggatgccggcctgggccatgatggccttcatgatgttcttcttgtcctgggagcgggtcaggataaagaccaactcccgctcagaggcgatagagacgccgaaaaactttttggccagttccataccggtccccttggcgtggatggtggtcccgccagtggcgcccgcgccgcgggcggcctccatgacctggtccgtatgcccctgattggcgatcaccaagatcagctcatgggcgatctctctctccatgggttcctccccctcctgattctgggtcagatattccttgacggacgtgccgccgatgctggacacgggcaccgtcatcagtacgccgttgcccggcacgtccagccacaggtcccgggccgccctgcgcaccatacaccgggaatggggggcaaggcagaacaggaccgacttttccgaggcctccagcccgagacagtccaggatctccgtggtggcggtcccctgtcccagcgcggtgagaaccagcgggatgtcacggccgcggaaccagttgataaacaactcacacttggaccggtcagtgatggtgatgataagatccaatccgctcatagcggtcactcctcctcgcgtcgtgggggcggcagcgccctcagagctcgatgatgtcatcatccgccggggcggtctgctctccgctggtgccattcttcttcaggcggtactgatagagcagtcccagcatctggatggtgatcagcggcgtcatggccaccatggccaccacgccgaaggcgtcggtgatgatgcttccgccgatggcgtcgcaggctcccatggcgaaggggagcagaaaggtggcggtcatagggccggaggctacgccgccggagtcgaaggcaatggcggtgaagatcttcggcgtgaaaaaggacatggtgatagcggccaggtagccggggatcagcagccagaagatggagatcccggtgagcacccgcaccatggacagtccaatcgacatcgccacgccgatggacagactggtgctcatggcccggccggggatggcaccggaggtgatctcctccacctgcttgttgagcacgtggaccgccggctccgcctggacgatgaaccagcccatcagcatgccgattgggatcaggacccagcgatagggcagggtggcgatctgatagcccagatagttgccggcgggcatgaagcccacattgacgccggtgaggaacagtaccagcccaatataagtatataaaataccgactacgattttcaagacctttttcttttttaatttcagggataccacctgaaacacgacaaaaaaggcggcgatgggggccagacacagggccacctctgcgatgtactcggggagaccctcctcaaacagcttccagagggcacggctgtccggaacctctgggatggagacaggggtgtaggccccagaggcggggtagagcagggagaggaccatcacggccaggatggggccgatggagcacagagccaccaggccgaagctgtcctgagaggcgtcggcgtcgctgcggatggaggagacgcccaggcccagggccatgatgaaggggacggtcatggggccggtggtgacgcctccagagtcaaaggcgatggcgagaaagtccccggggataaaggcggcaagggtgaacacgaccagatagaagcccaccaacaggcggttcagggggacccggaacaggatgcgcagcagagcgatgacaaggaagatccccacccctacggccaccgccccgatgagcaccgggttgggcacgccggggacctgggtggccaggacctggaggtcgggctcggacacggtgacgatgactccaatgaggaagcttaccgacaccacgatccacagcttgcgggagcgggtcatggccgcgcctacccgctcgccaatgggggtcatggcctgatcggcccccagtgtgaacagccccatcccaccgatcagcagcaccgccccgatgaggaaagtcattagggtggcggtggggatgggagcgatggaaaagcacaggaccaaaacgatcagcacgatggggagtacggaggagagggcctcccgcagcttttccagaaggatggtcttgctctggcccatctgatccctccaattttgcatatgttcccggagcaaaatcatcacctcgatagagaatatcgtcccaattcctttgtgggcgccaatctccctgtggggccgggagcagaaaggggaaatttcggcccaggggtacaaagtggaactgagcaaaaatataaattattttatgcgctttgataacagtttaccatggttttgcggctggctcaaccaaaaagggagatatcttaatacaatcttaatgtttggggcaaaataggcagaaaacggccggacccgttagaacgggtccggccgttaccggaacagtggagagggatgcagcagtcagccgatgccgcccatcacggagcccagaatgagcactgccagggtgaccccgcagaacaggtactttcccaggggatagaaccaggggcctaagggcctggtccgggccaggttcacctgctcctccacgaactgcctgccgcagatccagaagaacatgaccgccgccagcagcgcacccaggggacagatgtagatggagcaaatgttcatccaggggtccacgatgggggcgatgaccagcccaaccaggatgcctgctcccccggtgatggctgcggcggcggggcgcttcaggtggaacagctcctggagagtggcggtaggcgcctcgaacaggttgaccagagaggtgagggccgcgaagatcaccgcagcaaagaaaaggatcaggatcagccagccgccggggatggtgctgagcacgttgggcagatagatgaacatgaggccggggccgctctggtccagctgctggccggccaccgccatggcggggatgatgaccagggcggccagcagagcggccacagtgtcaaagacggccaccatcctggcgtcagagggaacattggagctgcggctgaggtaggagccgtagatcagggtgccgtttcccgctaccgaaagggaaaagaaggcctgccccagggcatagatccacaccactgggtccagcagccccttggggtccaggacgaagatgtactgatagcccgctccggaagcgggcagggtgaacagatagatggccagcccgacgaagaggacatagaacaggggggtcatgaccttgttggccagttcgatcccacggccaatgccgaaagccagaatggcgatggtcaccgccatgccgacgagctgccagggaacatttccagcagcagtggcattgaagtgggcggcgaaagcgtccaggccggacatgcgggacagggtgccggtgagagcgtcggcggtgtacttgaagatccagccggtgacgaccgagtagccgatcgccaaggccagggagcccagcaccgggatcaggcccagcaggcggccgggccgctcatggccgaagcgcagcttggtggcatagccgaaggcaccgatggggccggagcgggtggcccgtccaaaggccatctccccgatcaccccggtagagccgatgatgaccacaaaaatgaggtacgggatgagaaaggtggccccgccgtactgggagacacgggcggggaagagccagatgttgcccatccccaccgcagagccgatgcaggccaggatgaacccccatttagacccccaggagtcgcggacagcgctatgtttttccatggaaagacgccccttttcaaaaaataccgccggaacacgagaaaaccggcaggggccatgcgggccatgccgggtaacacttttttaattatagcacacacttggaaaaaaggcaaagaaaacctggtcacgttcgttttctcaccactgcagaggcgctgggctgccgcagggaggaaaattttccctagactccggctgttaagatgtctccaaggggatacgtcgtgtgggtgggacctcgccctatacttgtcctatctacacccgccgccgtggtaccagcatatactgactgtcgagaaacagcatcccacgccacagatgcggggaacaaaaatagccacggccgccggaagaattggcagccgtggccgttatgaaagatacaacaaggcgagcatacaacagagccctccggacggcggaaggaccgctgccggagggaaagggggcggaagtgctcactccaggtcgatggcattgacagggcaggattccctggcctgggaggcggtcttctccagggtctcagtgacctcctgaatgggctgagccagtccgtcgtctccgatctcaaagacctccggacagatgctgacgcacagaccgcagccgatgcagttggaattgacagtagcgttcatgatgtgctcctttcctccccggccagcggatgccgcggggcgtatctgagcacagtatgcccgaaaagcagaaaaaatacacaaacagaaaaaggacaggcaggccccgcaggggctgcctgtccggtataacgtaggggaagaaaatcagaggatccggcggccgcccacgaagccggtggtgtagtaggcactgtccatgtcgctgatgatgacgccggtgctggaggtggaggcgtggatgaactggcccccgccgatgtagatacccacgtgggaggcacggctggcaccgctgcccgacttcaggaagaagaccagatcgccgggctggagctcactcatagagacggaggtgccgttgctcatctgagcggaagcagtgcggttgagggagcagccaaactgagagtagacatagcggacaaagccggagcagtcaaaaccgctgggggaggagccgccgtaacagtagggatagcccagatactgcatggccagatccaccacctcggaggcggagccggaagaggcggcctcggccgcgtcgataatggtcacatagtccgcggacacatagccctcttccaccttgtaccagccgtccagggtctccagaatggtgaggaccttgccagtagagaaggagtccaccttctcactgtcggtgctgggggcggagcggacattcaaggggccctccgtgaccttgccgtagacgggctccgccacagtaggcagctctacagtctcagacagcactacataatcggtggagacatagccctgagtatcctggaaggagacctggtaccagccgctttcggtaataccagacacctcaatctgggagccgtcggggatggtctccagaacggcggcgtcggtgctggaagcgttgcgcagacgaagaccgccctcggcgtccactgtgccggacacagcaaaagccggagcgatcgtaccggtgacagccagcaggccggcggtcagcttggcagcaaaagactgagaaaagtgcatggcggaagtcctcctgatcgtcatatctctctttctggagcgcgggcggctctttacttcgtgctcagtgcccggtccagccagaccgtggccacgtccattgcggtgtataagctgtccttctctgtctttttgaccacccggtcccggctcttcaggtcgggatcggtcaactggagctgaacggccacctttgtggccacatccagatcgtccaccttcttagtgtccaggatctggagcatgatgatgtacttttcggccatcgtgccgtagtagatgaggttgtctttccggcgcaggggatggcccttataggaaagagggatcttttcagacgccatggtctgcctccttaaggaaattttaatgttgtaaccgaattgtaacacatttgaaaccctttgtcaaatactctcatctaatttttttctgggaaatggaggaaaggcggcggcagaggggatggaaagcggaaaaacggcctccggagctgcctctggagaccgtttttcgcctgaatggcggagatgcggggtcagaatatgctcaggctgagccggcggcccagctgttccagcagccggatgccagccagactgtttcccttttcgtccagcccgggggaatagatgccgatgcccatacgggcaggggagaccgccatgatgccgccccccacgccgcttttggctggcagtcccactttgacggcgaagtcccccgagccgttgtacatgccgcaggtcatcagcacggcgttgacatagtgggcatatcgggcggggaacagccgctcgccggagggggagcggcggccccggccggcgaaggtgcaggcgatatgggccaggtcccggcagtccaccctgatggagcaggcccggaaataacagtccagcacctcctccgggtcgtcatgaagcagtccgcagctctccagcagaaaggccatggcccggttacggctgccggtctgtttttccgagcggtagaccgcctcgtccaccgacaggctgggatttccagccagccggcgggtcagctccagcagccgctccagccgctgggaatagctcgtcccgtggatcagggtgcacagcaggatggctcccatgttgaccatgggattgagatgctcgctgagcagggcctggtccgtatagttgatggcgtcaaagggtttgcctgtggcctccactcccacccgggcgcggaccgtgtcctccccgttgtccatcagcgccaggaggagcaggatgggcttgatgatgctttgaatggtgaaggtccgcctgtactcccccgcggagctgatacgtccgtcgctggacaccacgcagatgcccaactcgtcccggtccgccttggccagctccgggatgtagccagccacccggccctcccgggtgaaggggcgattttcctccaccagcttttccagcagcgcgtccatgacgtccctcagtgcagctccagccacatggctgcgccggaggcgtaggcggcggcaccgtagatgagcgcctcctcccggaagcggatcttgggattgtggaggctgacaccgcagccgtcctgggcggtgccgcctcccaccacgaagaaggtggaggggacgcgggcggcgatctcggcgaagtcctcggaaccgctcattttctcaccctgctggagcattttcagtccctcccgctgccacccctgggcgacggcggcggcagtatccccgtcgatctggagggagcaggtggagcagagatcggtgacttgggctctgccccggaaggcctccgctgtgcaggtgcagatggtgtcgatccgttccagcaggtgggtgcgcagcggctcgctgaaggtgcgcagggtgccctccagcaccgcagaggaggggataatgttggccgcgtctcccccctggaacttcccgaaggtgaggaccaccagctcagcggggtccgcctcccggctcagcagctcctggagcgccagatggatgtggacgccgatgttgatagggtccacggtggactggggatgggcgccgtggcctccgcggccctccacccggatgaccaggtggtcactggaggcggagaccacgccggtgccgtagccgcccaggcccgctggaatcatggggatcatgtgggcacccatggccgcatccacatggggatcttccaggatgccggcctcaatcatggatctggcccctgacaggacctcctcgccgggctggaacatgaacttgacagtgccgttgagctctgctgcccggtcccggagcagctgggccgcccccagcagcatggcggtgtgcatgtcgtggccgcaggtgtgggcacagctgcgctgagaggcgaaggggagcccgctctcctcacgcatgggcagagcgtccatatcggcccggagcaggaacaccttcccgtcgggctttccggtcacggtggcggtgacgccccctcccagccgccggggctgatagcccatctcggtcagccgtgccatgacataggaacaggtctcgggcaggtccatccccacctcgggatgctggtggaggtgccggcggtcccggaccatctgttcatacagcgcctgagcgctctgaagataattcatacgatgtactctcctttccggtcaccggtccccaccctggggaagatggaccacccggatctgccccatccggtacagcacccaggcgcacaggatgcacagggggatgcaggccaggatggcgatgccgcggttgactggtgtgacgaacacgtggatcagaaagaccagcacgccggggaggacggcggccttgagcttgcccttgatgacagtgccgcccgccttgctggtcatctggctgaggaacaggcacccataaagcgccgggagcatatagcttccggcgatcttcaccggctcgctctccagaatgggctggagagggaccaggaggaggacgcccagtacgatgataacggtggttacgatagaggagacggccaccgccaccgtggccaccgcgtctccggcgtcggtattctgctccacatccgccatctccagggcgttcagggcgcaggggagcttcaggttggagatgttcccggtgatgaaggtgatgtaagaggcggagcccagcatggggacgtaggtgatgacctctgagatggcggtggggacatacagggccagcaggccgctgccgaacagcagcaggtccgggatggaagggaacatgtgatagacggtgcacatcaccgcagggatgcccagcatccaggcgatggccaggatgctgcccagccggcccgtgcggtggatggagcggtcgtagctttcagactgcttcatgtgagaacgagcctccttttaaaatatctgttccagcaggacggacgcggccatgctgacgatcagagagatggacatgatgaagctccccagccacttgagatgaaagcgcctcatgcacaaagcgcacagggccgccactcccatgctgatgaggaaggtcagggcgtaaactgttccggaggcgaagatcagcggcgtgaaggcggccacgatccccaggaagaagcaggagttgacgatggtgccccagtcgccccgctttttcttcagggtgctcatcccagtctggatcttttccaccgcgaagatgttgatgatgatgccggccaggatgcagatgctcattacgaacatgaccgcgccgaagacggtgtggtcggcctgggcggccatctcgcctacggagccgtagcccatgccgtcggccaccatgtctgccgccatcagctcatagctcaccgagcccaccaccgacagccgataccagggccatgggatgcccagtacagtggacagggtgaacagcccgatgacgatggagacagaggggacgatggtgaagaccgccgagctgcgggccacggcgctcagcttttccttggagatcccaagctccagacaccgcctccaggacttgcgcagaaagacggcggacagccccacgatatacaggaccccggcggcgaccaggacgtagaggagcggggaatttgccacatcaaaataacccatggtgttcctcccttggcagatagccagatttttttccaaatacagctgttttgttgtaaattatactatcatggcggagccggcttgaaaaatataaaatgcatttgctttccatatcaaaaatgatataatttaacgacatgatctcgttttgtgtctccgggacaaggggagcctggcgcttctgcctgaggggacggaaaatacacacaaagatcgggagccggaaaagagagagccgggaggggatcgcattggaagaactggatctgaaatacctgcaatacgccttagccgtagttcgctatggctctgtgactcaggcggcccgggccctgtacctggcccagcccaacttgagccgggccatcggggagctggagcagtccctgggctttcccctgttcctccgtaccagacagggtatgagcctgacgccccagggggagcggttcctgacggaggtggagacgctgctggaccggctttccgacctggcgcgggagtgccgtcaggagagccggcgccgggtccactttgcctgtgtcccctcctccctgtttgtcaacacggtgctggagacggcccggggcctgccggactggtccatccagtgtgaggagtactatgattgccgggagctctttgaccgggtgggaaagggggcatccctggccgcctttctcacctttggaacagagatgcgggaagagcttttcgcctactttgcccggcggaacctgcgctaccaccccctggcccagagcccggcctacggggtggtccgccggaccagcagcctctaccacccggagacggtcccgccgtccatccggtacgatgaggcccttttgatgctgaatgtgacctatttcgaccccataggggtgcattttcagccggagcgctccccgctgcccccggccaaagggatctgccacggcgtgggccgggcgggcaacctggatatgctggagtccatggaccacctggtgatgatctcctgtcacatccactccaagatcatggcgcggaatgagctggcggcggtgcccatccggcccgcgtccatggactatgaatatggcttcctgacccgggcggacgtccggctcagcctggaagagcaggcactgctggagaagatcgaaggggaggtgcagcgggagttcgaggcgtgagggccagatcggtgcccggatcagatattattgaagagaggagcggcgcacttcctgtgggggaagcgcgccgctcctcttgcgtctaggaagggatgaaaggggggcatagggggcatgataccaaaagtcccgatccgttggtgagttctcatcccgtagggggctggaacggcaggggaagcgtttccccgggcacacaaaacggaattggaacgtacagaagaaaggggaagagggccatgaaactgaaggatcagatcgcggtggtgaccggcgggagccgggggatcggatatgcggtggtgagagccttcctgaaggagggggcggaagtggtgctgtgcgccagccggagcgagacggcggagcgggcggtatcccagctgaaggcggagctgccggaggcccgggtatggggcatctggcccagcctggaggacccggagcaggtccggacggcctttgaccggatcggggcggagcatgggcggatcgacatcctggtcaacaacgcgggggtctcagagagcacgccctttggggcgtacaccggggagctctttgaccgggtgatggacctgaacgtaaagggaatgttccactgtgcccgtggggcggtgccctggatggagaggcagggcagaggcgtgatcttgaacacctcctccatggtgagcttctatggacagcccgccggcgtcgcctatccggtctccaagttcgcggtcaacggcttcaccctgtccctggcccgggagctggcgccgaaggggatacgggtcaatgcggtggccccgggcatcatcgagacggacatgctgcgggcagtgccgcgggaggtgctggctcctctggaggcccagatccccctggggcgtgtggggcagccgggggaggtcgcggaggccttcgtattcctggcctcggagcaggcatcctatatcaccggcgtggtcctccgggtggacggactggcccgggcctgaacagtgccgggctacggccgctttctcccagaggcactggggatgttcagctcctcgcggtatttggccacggtacggcgggagatggggcagccctgctccgtcagcagggtgcatagcttctggtcggagagaggcttggtgctgtcctcctcccgaatcaggcggcggagcagttccttggcggcacagctgccgacctcggcaccgctctccccggcggcccggcgggagagaaaatgacggaggggaaagaccccccggggacactggacatatttgtcccgaatggcgcggctgaccgtggattcatggatctccagctcttgggcgatgtcggacaggcgcaggggccgcagggcgctgggccccgatcggaagaagtcctgctggcggccggcgatagcctgggcacaccggagaagcgtggtctcccgctgaccaatggcccagagcacgttttcggcctggcggagcttcaaggtaagatattcccgcacctgggcgtcatcggactgggtcaggagactgcggtaataggagttgatctggaagtagggacggtcactgttccgcaggcgggcagtgaaatgtccgtccatctcttcgatcaaaatatccggctgaatataggagatctcgctggggagcgcgaagatggaaccgggacggggattcagctctcggatcagccgttcggcggagcggacctcctcctgagagatggagagacgggcggagatggcatgataatgttttttggccagctcctccaggcagtcccgaacaatggcaagggcggggccctcctcatggatgcggagcaactgaagctccagacactgggagagggaggaagcccccacacctgcgggttccagggagcgcagtagctccagagtgcgggcgagccgcctttgggagatgccagaagtccgggagagctcgtccagtgggatgcggaaatacccatcctcgtccagacaggcggacaggtagcacagaagctgcttggcagactcatccagatcgagctgctggatctggcggaagagaaaattggagagggattcctccagaccgccatccgtccccacctgggccagcgggtccaattcctcggcgtccaagcgctggtaatagcgattttgacggtcgctgtcctccagccacttcacacggcggaagagctcctgatcccggggagcttcctgctcggagcggggcggctccagatcgatgatagggttctcctgggcgagctcctgaacataagcctccaattccactgtgctcatctgaaggagcgcgaggctctggagcgtctgctgggtgagctgttgagtctgccgttggaccagttccataagggacgcctcctttttcagagctattatagcaaatatgccaaggggaaacaagataggcataaggcatgacgggaccgtacagaagcatacaccacataaaattaagaatatttttattctttttcatctgaatgaggtgcacctcatggaagtatgcatccaatgatggtaggattctgcttacagtattgtcgaaatttggagggaaatgaaatgcatgcatataccaagctggtcaaaaagtttctgaatgggtacatggccgagacacgggaacagcggggcatgtctaaggaagagatgtcggaacgcctgcgcatcgagccgcgttcctatgcggatctggaaaaggagcgctactgcctgtccgcaccgtctctgatgttcttcctgctcttcttggaaagtcccggggtggaggagctgatacagaaatttcgtcagacagtggagcaggcggaccaaaatgggacagtatagaacggagatcgggacggcggaggtatgtgacatgctgtgccggctgggcgccacggcaaattacagggggttctcctacaccgcctatgcagtgctgctctgtgtccagcagcaggaccggctcctgctggtcaccaaatggctctatccggatgtagcgaagcggtatgggacaaactggaaggcggtggagcggaacatccggaccgtgatcaccgtggtgtgggagcagaatcgtgccatgctggagggactggcccgccgtccgctgcttcagcgcccctgcgcggcgcagttcctgtccatcctgtccaacagcctcctgtgcgagcagagggcgggaccggtgcagagctgaaaaggaacataaaaagaggcagagcggacccgggagtgcatcccggagtgccgcgccgcctgttctgttttggccggtgccgccccacgacccagggcgggggcaggcggagatctggagggagaggaagttcagataacgcccttttcccgccatgcggagatctcctccggtgtaaagccgagggactggtagacctcatcgttgtgctcgcccagcaggggagcgcagcccctcacataggggttcgtctctgacatcttgacggcctgattcgtgatcctgacaggacccagctgggggtgggtgacctctgtgtacatgcttcgctcatccctgaaatgggggtcattggccacatcggccactgtcatgaccggcgccgccgcaattttggcctctgccagccgctccagaagcacgtttttttcgaattttgaggtctcctccgcaatcatggggtccagcagcacgcggtttttgacgcggtcctccacacgctggaactccggcatgtcgatccattcgtcatgccccagaatgtgggcgaatttcggccaggcgttggcttgtccggcgctgatcatcaccttttctccgcttttggtgggataggtgtttccgggggcactggcctcgaaaaagtttcccagctggtctatgacgccggagcggaaattttcaattagaacgtcggcctcccggagcatccgcttcaggacctcccagccctcgggatgcttcagattgagggtaatgccccgctgcccgcggttgaagacaacaaaatagttgctgataccgtcctttttgggcagcttgttccgggccaggtccccagaccccggggactcgattttgatgacatccgctcccatgtcggccagcatggaagccgccagagggcctgcgatcaatacctactccaccattaaaaaaccgctcgcgatcagaacgcagcgtttcaaaatgattgatttgcgatacatgatggcgtatgacgaaactgcatttttcaatccccacgcaatgaaaaccttggactgatgatttacgcaaaattagaataagaatagaaggcccgccgctgcgaatttgtcgcagcggcgggccttttgcgggggaaagg

SEQ ID NO: 13554 - DNA, 90879 bp, Unknown
  gut microbiota DNA sequence
gagccgggctccagccagatcaggggattatcgtgcgctgcgcagggcgtcccggaccaggtcagcataggtgcgcatgtcagtgatctggatccaccgctccagactgccgctccagcggtaggtgtggcagttggtggcctcctgcacgtcttcatagtaccaggcgtcctccgggttgtccggccagtggatcatgtcgtccagcatgtgatcggcgtcgggggcgcggtccagcacctcattgatgagggccatgacctcagcgcgggtgatgctccggtcggggccgtaggtgccgtcgggataaccggcgatccagccctcagcggcggcgcggttgatgtactcccgggcccagtggccggagatatcgctgaacttgtccgggccggagtaccgggcgtcagagaactgggcggccaccacagcgaactcggcgcgggtgatgtaggcgccggggtcaaattcgccgccggtgcgaccggtcatgatgccgccgttgttcagggtggtgatggagtagaaggaccagcggctggactccacatcagggaaggggttccgctcggtaatgtagtccgcccgggacgcgtcggtgagcaggcggaagaagatggtggccacttcctcacgggtgatggggtcgttgggctggacggtgccgtcggggtagccggagacgtaggcgaagtggtcctccttgttcagctgaggtgttccgccggagccgccgtgcccgcggtcgtcgtcgtcatcgtcatcatcgtcatcatcccggtcgtcatcgtcatcctcatcctcccagaacagggcgaagggggagaaggagtccacagtgaagcggatgccttcatccgtggccaccagggtgccgtcctcagtggagtagagctccatggtgtagttgccttgctccaggtcggtgttgctgttgcggtccaggcccgcatagtggaccagctggaactcgctgttccgatccgttccatcggggtagggccagtagagggtgatctccccgtcggtggtgacataggcgttgccgttgctggtgtccaccaggtccaggtagcgcagctccgcactgtggtcctcggtgatggagttgaatccatccaccgcgctgttgtgcagggtattgccctggtcggggacgatgctgtccaccagcagatgcacagcatcaggatcagcgacctccagcctgctctcattgatgtagagagcggcgtctgtggggatatgggcggtgatgctgttcacctcattggtggggggctcattgaccacgggggtggtggcggtgtcgagatcagtcacgccccggatggtcagcgtaccggatcccactgccgcgctgtactgctccgtgtctgcgcctaccgtaagctcggccttgacccgctgctgctccagatctccggcatagatggtcatgtcatactgccggaacacgctgttcacctggacagtaaagtcgtcactggtcatgaaggaatcagggtcgtcctgatcggtgaactggaggcggatggggacctcaccattgggggtttcagcgggcaggatgcggtagatgtagcggtcataggccatgctggtgttgccgggattgttgtcgtaccgctccagcttccagatccgctgttctccgccgaagttgtaagtaaaggtcagatatttggacaggtccaccacctgctgtccattttcattggtgacaacatcggcgggatctgcgtgtttgatcagccgctcattcaaatcactgggcagggtgatgtagaagcctggcacgggcagtccgttgtcggtggcgccgatctcgtttccgctgccgttgaccacgctctcatagctgctgccgccggtgtagatggtgatatcggcgggctggatcatgatctgccgggcgtcgggggtaccgtcgccgttccggtcataggcccacacggcgtagaccgtggccaccgccgggatgttgacttcggataccagagtgggcagctgttcgcccgcgtcatagatcttctcatggttgtcggtggtggtccagcccaggaagaggaccgctgcaccctcggtgtcagtatgggtgggggcggtgtagtcatcttcttcccccagttcataaccagtctgctgggccaggtccgggactacgaatgtggtctccccggcgatgcggccgccgttggcgtcataggtcagggagtaagcggtcaccggcaccggatcagtcgtatctgtaactgcgtcctcgatctcatctgcggtcacggcagcggtattcgtcacgcctgccgccacgtctgtctgcgccgcggtataggcataggtgatgatgaccttgtcgcccactccaatgctggagatggtgtagctgctgtcgctgagggtatgatcgatgtcccctacccggatcaccgtgccggcgctccacagggtgtcttcaatcgtcacatcagtcaggggcacattgccggtattgcgcactgtgatcgtatagtggatctgctctcccacacggacagatgcctcctgagctgttttctccaccgtcatggcgggtgccgccgcagtaagtctgtaggtgtaggtggtgctggtccccgccgtcaatgccgccccggccacgggggactcatcatcccacgcgccgctcaggatgtgcgctgcatcaggctcaacttttgtggtgtcaggaatattcgtcaaagtcggcgcgggactgacctcgacccatttgtcagaggtctcatcatattccgacaaatgatagacctgttcaatttccgtgcttccgtttgcccaggtgccccccacgacctgatagatcacttgggcctggtactgatccggggtaccgtcgccgccatcttcgccgccgactttgtccacggcgtaatacagcttcagcgtcacgatatcttccggcttctcaattttggtcagcgtaccggtcgtattggagagcgcagggtccagacagtacccctcatacacttttggggtggccgttacctctgccccgatcgccccggagaagcgctccgtctccgtcgcggacacaggataagttccatcgtcgtttgccttgtagtgctccacgacatacagaacattgccggggacaatgggggtggtgcttttggcaaaggtataggtgtacgtcacatcatcggtcccggaaactgtggcaggaggcgtggtatcccagccgccctgcgttccgtccgtgccaccatagccagcgtccggcttcattccggtgggggctgtcaggtaggcgctgccgttcatgtcccacttgccgtccttcatcagcgtcacataggtgactttggcggcgctggtgtcatcctcccaggtcccgtttaccacctggaaggtcactttcttctggtacttgtccgggacaccgtcgccgccattctcgccgccgacttcatccaggctgtaaaccgccgtgatctccacattgccggtgagcgtgccggaggtcgcccccttcaccgtgtctttggcatagctctgaccttcatatgtgatcgagtcagggatctggccgctcacatcatagggagaccccttggacatctcttcgctgacataagaagttttgatctccgtttgatccgcatcatccatcacatatttaacggtcaccgtgtactggtcctcacagaccacctggaacgtgaccgcctcgttgctcccgcttttcagattccagccgttgtgatacacataagtgactgtggccgtatctttcgcgggggtgtgagtcgcaccggtggtctcattatacgccgtcacgaagcgctcagaggaaatggtgaccgtatattccagatggcggtccaccacccgggaggatgtggtataatcccctgccgtcaaggtcatcggctgagaacctgcatggcccgcggcctggttggtgcagctcacggtgactttgatgctgttcagaaattcaggcgtcccggcctccacccacttggcggtcagggtcagatcgctgccgcggatgacgacctttccgcctgcgtccaccttggagccgtcctcatatcctgttccggaaatggtccagccgtcgaagacatagcccgtagccagcgcggcctggaccgcctcgtcagaaggaatggcggcttggacttcctcattgcgcttcagaccggtctgagtttcaggaacatcgtactcagtcagtgccccgctttggtcgccccaatcatactggatctgataggtgttctcatcttcctttaactccagcagcagatagaaggggtaaatggtgttcccgcctagatagctgttgttccagttggctccactaggttttgaggtgggatagtttcggcctaagccgccgacattgcgccaatgattaaaatcattttcgtcaatggaaacgtgcgttacagcggaataatccccgttttcgtccggctcaatggtgacagcgtcaccatattcgaccacaccgcacccggtatagtttccgcataccagacggtaggaggagagatagtagccctccgccacccggatgtccaggccgctgcggatcagctggcccgcgttggccgcctccggatcatccagggcatcctgaggggatacatctttccttgtataagtgacatccttcgccccggcggacaccgttaccagagaggggtccgtgatctcttcattaccccatccgtgatattcgtcaaagctccaatacacgggccaccagttgcgccactggtccccacgttcattctcatcggtcttttcctccagcgtccaggtataggtccactggtagcaggagtcaccatgctggtgctcttccttgctgcaggtcaatatgtaacatccggttttgagagaacattcgtgcctgcactcggtggggccttcggttttgtcaattacttggtatccccatgtgtaatcgaagcccccaaagtagtgaagtgtgcactcagtatcacttttatggagcccgaagctaccataatggtccggattgtcctccttcgtacacttcacccactgtgtggggtagcagtcgtcatcgtgctcatgtacacagttatagatgcagcagctgtccagagagtgggcgtgctcctcctctttgcaggtaagatctccccgctcagcgtcgggccctacccactctgtcccatccggaatgttttccggcggcttttgatcggggtcgatcgtttcaaacgtatctcctatctcatactctgaccctcccggcgccgcaaaggcggacaccggaagcagggacagcaccatgcacagagtcagcaatacggccaagaatcgctttttcatgtcatttctttcctccttagtagctgatattcatgccagcgcaatcgagagctgggggggtgtggtcacatcatccccaccccctttccggcatcccagcccacggagaactgttccgcctccatcatctggtcgaaggcctggaccaccagctggtccacactgacccggatggcatcctgggtctcctgccacagccggcgcagacagcgtgggttccctttttcctccggcacccgggcgtcccggcacagggaccggatctcgcccgtcacctgggtccgccgtatgggctgcccgttccggctgcggaacaccggtcctgcggtgatgccctgccgggccgcatagccccgcagctcctccgccagcggcggcggcagacgcacggggctgggtccccgcccgtccagcgcctccgccgtcagccggggcagctcccccaccgacaggcccgtgctgccgaataccttcaccagcaggtagagccgctccttctccagaacccgggcggtggacagcagacgcagatactccccgcgggtcagctccggccgctccccctccgccgggggcgggagggcggcggtggcctggagttcccggtggcccagataggtcatcaggccgttggccgccgccagccgcacattgatagtccggggaagatacccctgatcctccagcgtctcccgccaacggtccagcgtcccgcggcctacccgcttgtccggcggcagcgaccggtacagcccatagatgctccgccggtacgccgccagggtgtctgcgctccggccctgctggcgcagggtgtccagataggcgtccatggcctccggcgtgaggcatacctcccctgccggggcctcctgttccatcaccagttccatgccgttctcccctctcgccccccagttgtaggcaaaatcaatattttgccgcgttctatcccggggaaggagctgttcgggcagaaaaaaagagcgccggcggcgctcctgagggaaaaagggcgtgaagattgagccgtatgagcaatttgggctcatatggctggtctttgcgcaaatttagcagctccagcttgaattttccatcggcctgtgctataatctaccagaaatctatgtagcctcctgcggcctttcctggtcgctggatgcaaaatattgattttgtctagcagacgaggcgcaggcggtccagatcccggcggtgctgggcaccggtggagatgagatagatgcgggtggtctcaatgctggagtgccccaggacatcggccagcttggccacgtcccgggtggcctgatagaaggtgcgcgcaaagagatggcgcaggttgtgagggaagaccttggtgggggccaccccggctcggaggcacaggcgcttcatctccgcccagatctgccgcctggacagaggcttgccgcttttggtgaggaagatctcgccggaagcggttttttgctgtctggcgtacttgagcagcttgcgacacagcttgccggggaggaggatggtgcggaccttgcccttgagggcgatatccgcctgaccggaacaggcggcctccacagtgatatagcgcacctcgctgactcggatgccggcggcgcagatggtctccatgaccagggccaggcggtcccggcccaaggtgcgggcggtgtccagcaggcgctggtactcctggcggctcagctcccgctcctcgctctgaaagagtctgcgctgcacccgcagggcgcggacacggcagtcctccaggccgatgaaacggagaaaggcgttgagggcggccagcatggagttgatggtggcggggcggtagccggagcggaccaagtgggccttccagcccgtgactgcctcccggctcaccggcgcccccgccagccactccagaaaggcccctgcgtcccgcaggtacttctccactgtccccgcgctccgctcctcctccgccagcctccgggcaaaggcagacagatgttcctggggtacatggtgatctttcatacaaaaactccccttttcttccagtgtggtactattttaccggaaacggggggcgtttatccgaaacctaggggaagaaaaggaggaaggctgttcaatttgcagcccaacctccggcaccggacactcctttttatatataaggtatgaaaatacggggcgggggagaaaaatcgttgacttgaatatcctgggagggtatgctatactcaactttgtatgaatccacggagggcccgggccgcacagcatactgacagggggaactgccggtatgctgttctgcatcgggacaggggagccgggggctccggccccggcagaagggggaggcagcgtgctgcgcctgttgtccaatcagaattttaaccctacccgcctgatcgtggtgagtttcggggccatcatcctgctggggacttttctgctccacctgcctatctccgcccgggacgggcagttcaccccctggctgacctgcctgttcaccgccacctccgccacctgcgtcaccggtctggtcctggtggacagcgcgctccactggactcccttcggtcagggggtgatcctggccatgatccagctgggcgggctgggatttgtctcattgatcagcctgatccctctgctgctacggcggcgcatcggcctgtcccagcggctggccatcgcctccgcatttaatctgaatgggatgtccggggtagtgcgggtggtgcgccacgccctcatgggcacctttctgctggagggctgtggtgcgatcctgctggctacccgcttcgtccctctcttcggctgggggcgggggctgtggtactccatctttcacagcgtgtccgctttctgcaatgccggattcgacctgatgggggagcacaccggggccttctccagccttgcgggctttcgggaggacccggtggtgctgggcaccatcgggtgcctgatcgtgctgggcggcctgggcttttttgtttgggaggactgcctggagcatcggagctggcagcggctgtccttctactcgagaatggtgcttgccgtcaccggggcgctgatcctggggggctggctgttctttctgggggcagagtggaacaatctggagaccctgggtggtatgacggcgggagagaaggtgggcaatgctctctttcagtcggtgaccctgcgcacagcagggtacagcgttctggaccagggggccctgcgggaaggggcggctgccctgtccgtggtgctgatgctgatcgggggctcctccggctccaccgccggcggcatcaagacggccaccgccggcgtgctgctgatctcactgtgggccggcctgcgggggagagaccaggtggtgctccggcggaggaccatcccccaggcccgggtgctcaatgccatgaccctgaccctggtggtgacctgcctgttcctggccgggtccatcgccctgacattggcggacggggtcccctacctggctgccgccttcgaagtggcctcggccatggggaccgtggggctgaccatggggatcaccaccggcttgtccccgctgagccagggaatcatcatcgcgatgatgttcctgggccgggtgggcgtgctgtccttctccattgcgttcctgatccgggaccggggagagaataagatccgctaccccagtgtggatgtgatgatcggctgaaggagatgtctatgaaaagctttttggtgatcggactgggcagattcggcacatcgctggcctgtgagctgtgtgccctgggccacgaagtgatggcggtggatctgcgggaggagcgggtccaggaggtggcgggctctgtgacccacgccgccgccggagatgcccgggacccggaggtcctccgggccctgggagccaggaactttgactgtgctgtggtgtccgcaggggacgacgtgggcaccagcgccctcatcgtcctcaacctgaaggagctgggagtgccccaggtggtgggcaaggcccgcagcgccgtccaccaccgggtgctggagaagatcggcgccgaccgggtggtctttccggagcaggagatggccctgcgcctggcccggaacctggccaacggggacattctcaactttatcgagctgtcggaggagtactccatcatggagtgccgctgtccccgccagtggcaggggaagagcatccgggaactggacgtgcgggccagacaccgcctgaacatcatcgctatccgccgggggggcggcatgaccatctcccccggaggtgagtacgcccttcaggaggaggacgagctggtggtgctgggacggaacgaggatatcagagaggtggagcggctgtgagagaggagtggatcaccagccggaagaaccctctcctggtccagatccgccgcctggcctccagccgcggcgcccggcgctcagcggggatgttcctgggggacggcgtcaagctgctggaggaggccctgaagtggggagcgcccctggagacggtggtgtactcggaggggctggacgggccggagctcccgccggaggtgcggacggtccgggtgccggaggatgtgatggcctccatctcccccatggagtccccccagggggcgctgttcctgtgccggatgtgggacaccgccccgccgccccgcctggagggcgggcgctatctggtgctggacggtctccaggacccggggaacgtaggcactatctggcgcaccgccgatgccctggaggcggacggcctgctcctggtccacggatgtgcggaccccttcggccccaaggtggtgcgggccaccatgggggcttgtttccggctcccggtgtgggagaccggcccggagaggctggcgggcctgctggagcggtcaggactggcgctgtacgccaccgccctgcgggaggatacggaggatatcaaaacggcggacctgagccggtccgccgtggtgatcgggagcgaggggcgcggggtctcgccggaactgctcgctatgagccagcgggccctgaagatccctatgcgggagcggtgtgagtccctgaacgccgccgcggccgccgcggtggtgctctgggagatgggccgctaatcccggcggggccggtgtcctgcgtccagctttcggtaggcccgctggatgatgaccagtgagacggccagacacagggcgaacagggcataggccggaacatagctgtggaagcggtcagccagcaggcccgggatggggccgaagaggagcatcccaagagcgtaggacacagtgagggagcgcaccgcaccctcgtactgggcgtccccgaacaggtcggcggaccagatggcaaaggtcaccgccgagatgggcaggcccaggccgaacagggtcatggccgcgaaagcggggagcatcccacccaggtgggccacacagcacaggagcagtccggccagaaagatcaaatggacgtaccagttgcccgcccggctgccaaagcggtcatagatctggccgcagaggatcttggatacgcagatgaccagccccaggtaagagatgagcagagcggcggaggcgctgtcatagccggcggtggtgtagagcactgtgaggtgggagaaaccgggcccgccggggccgccgatgagaaagacagccagcagcagggacagccggagggcgggagtcatgcctgccggcgcggggcggggcggcggcgccggagtctccggaccgcccaggtggtagggctccaggcccaggtcgccggggacgtcccggaccaggagaaagaccagcagccccagcaccagcaccgccagcccctccagcagaaaggcggcgcgcatgccgtgggcctggatgattccggtgatcagcgtggggacaaagatggtggacacgccgctgcccgcggcggccagccccagagccaggccccgccggtcccggaaccagtggcccaccgcgagagagagggggaccatgccgccgtagccgtaggccagaccagtgagggcccccgcggcacagtagagggggaaactgtcggccaggccgaagcagaagcaggacagggccagcagcactacccccagggtcatcaccagacgcagtccgatccgggcgcacagctgattcactgtcagcatggcggccagggtgaagaggctgcgcgtggtggtgatccaggagccctgggcgttggaaaagccgttgagctggatgatgtagggctgatacacggagaacacgttgatgcccatccccatgaccgcgaacagggacagggcgccgcccagacagatgatccaggcgtaatggggccgccgaagggagaccatgggaacagcacctccttattcctatctcctaccatacaggaggcggggacgtttgtaaagggggattttaccggaggagcgggacggagggaagaaaattggcgacgctgaaatactggctgtggctcaccggccgcagggggctggggaatgccggcgccctgcgggtgctggaccactttgtcaccccggagcgggccttctacgccgacccggaggagtacgccctggtggaggacctgaccccggcggcccggcgcgccctgctggacaaggacaccggcggggcggagcgcatcctggaggactgcgcccgcctggacctgcggatcatgaccctccaggacgccgactacccggagcggctgcggcagctgcccgacccgcctctggcgctgtacatccggggccggaccttcgccttcgacgaggaggcggcggtgtgcatggtgggggcacgggaggccaccccctatgggatcggctcggcggggcggctcggcctggagctggcccggggcggggccctggtggtgtctggcatggcccagggcatcgatacggccagcgtccagggcgctttgaagggcggaggaccggtggtgtcggtgctggggggcggagtggatgtaccctacccccgggagaaccgctggctctatgaggacgtggccgccgccggggccctcatctccgagtacccgccggggacggagcaccggggggagcacttcccggtgcgcaaccgcatcctcagcggcctgtgcctgggggtagtggcggtggaatgccgccctcacagcggcactatgattacggtggaccgggcgctggagcagaaccgggacctgtttgccgtgccagggaacatcgacgtccccatgagccagggccccaacctgctgatccagcagggggccaagctggtgaccagcgggcgggacatcctggaggaatactgggaccgattcccggccaagctgtctccgggagagcccctcagcccggcggcggccgccgcccggctggagacagcggcctgtccggcccctgccccggcggagcgggaggaggcaccggcggcacccgggcgggagcgcatccccgccgcggagcagcgggaccgctttaccgacgacgagctggcgctgatcgccgccttgggcggccggcgccgctccgccgacgagctggtggaggccgcacagatcccggcccgccgggtgctctctgccctgaccatgctccaggtgcagggggcggtggaagaggggccggaccgccgcttctccgccctggtggagctggaggaatagacccttgacagacgcgcgcggggacgctccgcagctgcgttttgacttatacttttttcttatcttcgattttggaggttatttgatggcagcaaagaccgatttggtgatcgtagagtctccgtccaaggccaagaccattgggaagtacctggggcctggctatgaggtgaaggcgtccatgggccacgtccgggacctgcctaagagcaagatcggcgtggacatcgagggaggctttgtcccccagtaccagcccatcaagggcaaagaggacgtgatcagcgacctgaagaaggcagccaagaagagcggccgggtctatctggccaccgacccggaccgggagggggaggccatctcctggcatctgaaggagctgctggatatcccggacgacaagacctatcgggtcaccttcaacgagatcaccaagaaggtggtcaacgactctattgccgccccccgggccatcgaccagaacctggtggacgcccagcaggcgcggcgcatcctggaccgcatcgtgggctatgaactctcccccctgctgtggcggaagatccggcggggcctgtccgccgggcgggtccagtcggtggctacccggctggtggcggagcgggaggaggagatccgggcctttgtcccccaggagtactggaccatcgaggcggagctggagcgggtgcgccccaatctggggggcttcaaggcccagttctacggccgggagaagaagatggagctccgcagccgggaggaggcggaggaggtggtccgggcggtgtccgccgcccccttctccgtgaccagggtgaagcgacaggacaagctgcgcaatccggcgccccccttcacgacctccaccctccagcaggaggccagccgcaagctgaacatgacccccgcccgcaccatgtccatcgcccagcagctctatgagggcgtggacatcaccggggagggcaccgtgggcctgatcacctatatgcgtactgactctctgcgcctgtccgaggaggccatcgccgccgccaagggctttatcgagagccgctacggcaaggagtactaccccgcccaggcccgacgctacaagaccaagggcaatgcccaggacgcccacgaggccatccgtccctccgacgtgaccctcaccccggaggacgtgaagaaggacctgacctcggagcagtaccgcctctaccggctgatctggggccggttcctggcctgccagatggcaagcgcggtctatgacagtgtatccatcgaggcccagtccgccggctacaccttccgggccagccactcggagctgaaattctccggctttaccgccgtgtatgaggagggccgggacgaggacgacgaggcaccccagtcccccctccccgacctgcgggagggggagccgctggaccggaaggggctgaagcaggaccagcacttcacccagccccccacccggtacaccgaggccaccctcatcaaggctctggaagagaagggtatcggacgcccctccacctacgcccccaccatctccaccatcctgaaccgggagtacgtggtgaaggaggggaagtacctccgcaccacccctctgggcgaggtggtcaccggcctgatgaaggacaaattcaacgatatcgtggactacgccttcaccgcccagatggaggagcggctggacaaggtggaggagggagaggccaactggaagaaggtgctctctgacttctacggcggctttgaggcagagctccaccaggcggagcaggacctggacggggagcgcatcaaggtgccagacgaggtttcggaggagatctgtccccagtgcgggcggaacctggtcatcaagtccggccggttcggccgcttcctggcctgtcccggctggccggagtgcgacttcaccatgccgctggtggtggagatgccgggcaagtgccccaagtgcggagggcgtctgttcaagcgcacgggcaagagcaaaaagaccaacaagcagtacacctattactgctgtgagcacctcaacagcaaggacgagtccaagcgatgcgacttcatgacctgggacgtcccggtgaaggacaactgtcccgtctgcggctggaccatgttcaagaaggcgggccggggggcgaaaaagcccttctgcatcaacgaggcatgctccaacttcaccccggaggagaagcggggcggctggcggaaaaagacggaggagagcggggaggaggcccctgcccaggaggcggcggaggagggcaagaccgccgagaagaaggctccggccgccaaaaagaccaccgcgaaggcggcggccaagaagcctgccgccaaagccgcggcctcaaaaaaggcatccgcggcgaaaaagcccacggctaagaagaccgccgggaaaaagaccgccgccaagaagacggaggagggatgaccggcgggggctgaacgctcaggcggtcagccttccgttcagctcccggcacaggtccacggtggccaggaacatggcctccagcaggcaggagttctcctgaaaggcggccttttcatagcggtcgaacagggtgcgcccctcttcatccagatgatcgaggatctccagggaccaggtatcccgccgggtgctgctgatccggtaatcggagtccacagccaggtaattttgaagggtaactttgttgatgtactcaaagagagcttccataagatcggtcattgtgatcaactccaaacacgaataatttatacatgttataacacgtatagattattcgtgtcaagaggaagtaaagagatgtatggagaacgattaaaatttttgagaaaagaacggaagattccgcagaaagaccttgcggagctgctggggatcagcatccgtggatatcagttctacgagagcgagaacaatgagcccaatattgccgcattggtgacattggcggatttttacggggtgaccatcgactttctggttgggcgcacggacgaggaagcataacggtactgcgtatagggcgcagcggcccggcacaccgctgcccaaagcctttcccctcgggaaagaggtgcccagcggatgccgcatccccccaaaagccttcccccctcctggggggaaggtgtcgcggcgtatgccgcgacggatgagggggcggtcctccgcccgcctctggccgcagggcggaacccccaaaaacacttcatcgccgccctccggcagggcgggcggatctcgaggaggagagctatggaaccagtgaagatcatcggcgccggtctggcgggctgcgaggcggcctggcagctggcccagcggggcatcccggtggagctgcacgagatgaagccggagaagatgacccccgcccaccacagcccggagtttgcggagctggtgtgctccaactccctgcgctccgaccagctggagaacgcggtgggactgctgaaggaggagctgcgccgctgcggctctctcatcatgtcctgtgcggatgcccaccgggtggaggcggggggcgccctggcggtggaccgccgcgccttctcacaggcagtgacccaggccatccgctcccaccccgccgtcacggtggtggagggggaggtggagcgcattccggaggaggggcaggtcatcgtcgccgccggcccgctggcctccgacgccctgacggaggagatctcccgcctgttcccggacagccgctacctgaatttcttcgacgcggcggcccccctggtcacctttgagagcgtgaatatggagcgggcctggtttgcctcccggtacgaccgggggacaccggattacatcaactgtcccatggaggaggaggagtaccaggccttctgggaggccctcaccaccgcccaggaggcggaggtccacggctttgaggactccggcgtctttgaggggtgcatgcctgtggaggtaatggcccgccgggggcgggacaccctgtgttacggcccgctgaagccggtgggcctgaaggaccccaggacggggcgggagccctttgcggtggtccagctccgccgggacaacgctcagggctccatctataatatcgtgggcttccagacccacctgaaatggccggagcagaagcgggtgttctccatgatccccgggctggagcgggcggagttcgtccgctatggggtgatgcaccggaacacctatctggactccccccgcctgctggaccggtactaccgggtgcgggggcaggagcggatcatgttcgcgggacagatcaccggcgtggagggatatgtggagtccaccgcctccggcgcgctggcggctatggagctggcccggcggctggaggggaaagagcccatcaatttcccccgggagaccgccatgggcgcaatggccctttacatcagcgaccagagtgtggtaaactttcaaccgatgaatgtgaatttcggcctgatcccgcccctgggctaccgggtcaagggcaagcgcaacaagaacgccgagctgtccaagcgggcgctggaggcgctgggggagctggagctctcctgacgggaccgcttgagacctcgggacgggaccggagctgaggaagaggccggttcagacctttccgtcccctagggccagccgaagtcccagacggaggccgtgggcgaaggagaccaaatcgctctggttagtgaaacgtaggacggcgtcccagagaaggtcccgggcctctgggtcacggatgacctccaggcggtccagacagctggagagggcctgacggcggcgctcatactctgggtcgtcctcatacatcagccgcccagagtctacctcggaaaaatagagttcttggagctggacttccattgcaacatcaccacactaaaaggatgtatttaatatatattcttttagtgtggttgtcaagggggaaatatgtttcataaagatctatatgggctccgcttgaaaaaattgagaaatctgtctggggagagacaggcagatttggcggcaattttgggcgtgaagcccaatcagatcatggaaatggagaacgggcgaaagaccaccacattggaaaagctggctctgatttgtcggcattacaacgtctcggcggactatctgctggggctgaccgacgagcccaggccgctggtacagcaagagaaagaaggttaatggaatgaagatcatagtggacgccatgggaggagacaatgcgccccaggctccggtgatgggggccgtccaggccaaccgggagtatggtgtggatatcatcctggtggggcggggggaggccatcctgaaggtgctggaggaaaacggcatccaggagctgcccgccggcgtggagatcgcccacgccagcgaggtggtggagatgtgcgacaacccggccaccgccttccgggagaagaaggactcctccctgacggtggggctcaacctgctcaaggacggcagcggggacgcctttgtctccgccggctccaccggcgccctgctggccgccgccaccctgctggtcaagcgcatccggggcatccgccgggccgccctggcccctgtggtgcccacggggaacggcggcgcggtgctcatcgactgcggcgccaacgccgagtgtccccctgagtatctgatgcagttcgcctatatgggctcctactacgccgagcacgtgctgggccgcccggagccccgggtgggcctgctgaacatcggcgtggagccctccaagggcactgagctgcagcgcaccgtctaccccatgctccagaaggctgaccaggagggccgcatccgctttgtgggcaacatcgaggcccgggaggccgtggagggcagcgtggacgtcatcgtggccgacggctactccggaaatatcttcctcaagaccatggagggcaccggtctcttcctggcccgggagatcaagaagatattcaagcagaacctgctgaccaagctggcggcggtgatggtctccggcgggctcaagcggttcaagaagctgatggattccagcgaggtgggcggcaccgctctggtgggcatctccaagaccgtcatcaaggcccacggctcctccaacgcctacgccttccagaacgccatccgccaggccagccagtccgtctcctccggtctgatcgagaacatcaccgccaacatcgacctgatgcgtctggacgcgccggaaaaggaatgacgtttttcgaaaaaatggaaactccctattgacagccaccctgtttgtgcatatagtagggacagaaaaagtgctggagcacagcaaaaggagcaggctagttatgatttttgaaaagctgagtgcactgatcgccgagcagttcaacgtggaccccgacaccatcaccatggacacctcctttgaggacgacctgaacgcggattccgtggacatcgtggatctctccatggccctggaggaggaattcggcattgaggagctgggggaggcggaggctacctccatcaccaccgtgggcgacctggtccgcctgatccagagcaagatcgactaaaggcacaaaagacaagattcaaagctccgccggagaggcggagctttgccttagcgggaccaagaccggcgcgggccagccccgcgccccgggaggagacacaggaacatgaccacattagaggaaaagctgggctacacctttcagagcccggaactgctggaaaacgcgctgacccacagctcctgcgccaacgagagccgggggaagctgcagagcaacgaacggctggaatttctgggcgactccattctggggatggtggtggcagaccacctgtaccggaaccacccggacctgccggagggggagctgacccgcacccgctccgccctggtgtgcgaggagagcctggtggaggtggcccaggccctggggctgggagagtatctgaagctgggcaagggggaggaggccggcggcggccgccaccggccctccatccaggcagacgccgtagaggcggtgctggctgcggtctatctggacggcggcatcggctcggcccggaagatcatacagaaattcatcctcagccgggaggtggccggcctgaccaagccccgggactataagaccgccctccaggagctggtccagcgggagagcgggcaggtgctggcctaccagctggtgggcgaggagggtccggaccacgacaagcgcttttttgtggaggtggacctgaacggcaccccggtgggcagcgggcagggccgcagcaaaaaggaggccgagcagatggccgccaaggcggctatcgggaagctgggcggctgaagcggccgctccccggaaaagtgaagccccgcccggctcgggcgtcagggaccgccccggccgcaggccggggcggtttttacgtgctccccaacgccttcccactggggggaaggtgtcacggcgcaggccgtgacggatgagggggcgtccttccgtacagcaaaaatccacaggataggcggggcatgctcttcttgctccggactccggggcggagtcccctgggaagggcacggaaatatattctgtcccgctctcgacgggggaaataaaaattttttcaaaaaaccattgacaaacgtggttagcatatgctaatataaacgcggttagaggaaactaactggccgggattctcctcacacctccctgctttcttccccacacttgttccggcctgaatcctccagccaccagaatccccgaatggacaggcatcccgtttgggaaacagcccacagccgcgatcacacgcgcggctgtgggcctcctcctttttggggggaggggtaactgggatgttgacgggggcgcctgggcatgatatagtggaaaaaaacaggcgggatctttgccatggaacagatcctgttccgcagggaggggcacctttgaacaaaaatctgctgagaagcatccttttgatcatcacctactcggtggtgctggtgctggtactggtgaagatcgacctgatatgggccgtggcggctcagatcctgggggcgctgaagcccctgttcctcgggttcgccatcgcattcgtgctcaaccggccctgcaccttctttttccgactgtaccacggggggctggcggggcggaagctggaccgcttcagccgtccgctggcagtgctgtccgcctatgtggctctggtggtggtggtcaccgccctgttctcctttgtgctcccccaggtggcggacagcatccgtctgttcgtcagcagtctgtccggctatatggccaacctccaggccctggcggacgaggtgttcgccctgttcgaccgggagggcgtggatttctccagcctgaacgaatatctgcggcgggtgctggagggggtgctgaacacagccaccaacgcggcctcccatgtgctggtcatcaccagcggggtcatctccatgggggtgacgctggtgctggccatcgtgttctccgtctacatgctctccgggcgggagaagctgctctcgcagtgccgccgggtgatgcgggcctacctgcccggctcctgggcggaccgggtgcagagcgtggtccagctctccgcggacaccttcaccaattttgtctcggggcagctcaccgaggcctgcatcctgggggtgctgtgcgccttggggatgctgttcatccagtccgactacgccgccttggtgggggtgatcgtgggcaccacggccctgatcccggtgatgggggcttatatcggggcggttctgcccgcctttctgctgctgatggtggacccgtggcgtgcattggcgtttctggtattcctgggcatcctccagcagatcgagggcaatgtgatctatcccagagtggtgggcacctccatcggcctgcccggtatctgggtgctggctgcggtgacggtgggcggcggcctgttcggcctgctgggcgtgctgctcagcgtgccggcggcgtcggtgctgtacaccctgttgaagcggaatgtgcaccgccggctggaggagaaaatgcccgccccggagcaggcagaagagggaacagaataggcacaggggccggcgggatctccgccggccccttctgacttgcggctgcccggcctccggggtggtcctcccctcccggcccggtgccgggatgcggtccgatgggacatgggtccccctgagcgagaaatcgagccacagagacgcaggccgaaaagttctttcagattttgaaaaaagaatacccaagcgcaaagatttatggtatgatgacaaaagggtgattttccagccggcagagccggccgagaggagggaacggcacatgagaagacatatcgggctggtgctgctgacggcggcgctgtctgtcctgctgaccggctgcctgttccgctccacagaggatctgtacgcccttccggagcgctttccaggctatgaggacctgaccggcaagcgcagtgagatccaggccggcctggagatggagtatgggaccacggtggagactgcggtcatctactccggcgacaacacctctgtgatccagtttcaggatatggacggcgacggctcccaggagactgcggtcatctccttccgcatcccgggggcggagcgctccctgcgggtctatttcctcaccacccagggagacaccgagcgctatgagatcagcgcggtggtggagggggacggcaccggaatcaacgccatcgattatgtggagctcagcggcagcggcaaaaaggaagtggtggtcagctggcgcaccatcgagggcgtcaaccagctgggcgtctactccctggacgagctggagagcaatgagaccgttccggtggcctcccagctcctgatgaccggatacagcggatacagcctgctggacatcgaccgggatacccggacggagctggcggtgatccgcctggacccggcgggcgtggacagcacggtggaggtctacggctggcagaatgggatgctggatcggctggggaccgcccggctctccgccggcatcacggccctggcctccaacggcgtgcggatcaactacctcaccggggtgatccccgccctctatatcaccagcaccctgacggacggaggacaggccactgacatcgtggccatgcgggacggctcgctggtcaacctgaccatgaaccaggagacaggcgtgagcgtggagaccatccggggctatggtgatatccgccctatggatgtgaacagcgacaccatcctggagatgccccgcccccacctgctgcccacctacggggagaacctgtccagcgacttctggctcatcgactggagccagtacgacgtgggggggagggcggccccagtctttaccacttatcacaatatgtccgatcagtggtatctgatcatcccagaggagtgggtggaccagattaccatctcccgaagcgacagcagcggcatacgtgcggtcatcttctccctctggaacgggcagaagaaggctcccaccccgtttttggccatctacaagctgaccggcatcaacagcagcagtcaggccgccaaggaggggcgctttattctggcggaggacggcgacgccatctacgcggcagaattttttgagagcggctggaactgcggattggatgaggccggcgtgcgggacagcttccgcctgatcctgagcaactgggccggagactgaccggagcgatccacaggaggaacggaaatgaaaaagatcctggtgttggaggacgaagagaatatccgcagctttgtggtcatcaacctgaagcgggcgggctacgagactgtggaggcgggcaccggagaggaggccctggcccagctgaagcagaaccctggcatcagggtggccctgctggacatcatgctgcccgatatcgacggctttgaggtgtgccggcgcatccgggccatggacaataagatcgggatcatcatgctgacggcccggacccaggagatggacaaggtgaccggcctgatgaccggggcggacgactatgtgactaagcctttctccccggcggagctcaccgcccgggtggatgccctgttccgccgcactggaggggatgaggagctggaggcagatgacgaggtggtccagccccccttccggctgaatacccgcaaccggaccctggagaaaaacggacagcgggtgaagctgactcaggtggagtacggcatcgtgaagctgttcatggagaacccgggcaaggcactgtcccgggaagagatcctggacgcggtgtgggggcgggactactttggagagctgaagatcgtggatgtgaacatccgccgcctccgcatcaagatagaggacgacgccacgaacccggtttatatcaccaccgtgtggggatatgggtacaagtggggcggataagcaggctcccaggggcgtcgtccggggccccgcagagcggggcgcgcggcagcgcgtcaatgcttcgcagtgcgaagcattggcggaggggcaattcatttgccccgagcatcggaaaaaagaggggtccccaaagagcgagctctttggggagggacgccacgaacccggtttatatcaccaccgtgtggggatatgggtacaagtggagcggataaagcgaagaaaacagcggggataggcccctgaacggagaggagggatacggtggcgaagaagacagtgatccaggaccgggtgaagatccggggcatccggaagcgctggctggtgaacagcatgggcgtggtgaccctgatcctgctgctggccatgggaacgctcaccttatccctgtgggcgtactatgaggggtccatgcgggacaacctctcctcccgggcctctgacacggcccggagcttcagcgtctacacccggcgggagtaccggacggcagcccaggactatgtagcaaaatttcccgataagcagaagctggaggtgcagttcatcgagacagacggttcgctgctgtgtaccagctacggcctgaccacctcgggcacgatgccggggacgccggacatcaccggcgccatggagagcggcgatgtgaagccttggacgggacaggacccccagacaggggagcggatcatggccgtgtccgccccaatcatctaccaggggaccacagtgggcgtgatccggttcgtcacctctatggcggcggtggaccggcagctgttcctgtccatcggtgtatgcaccctgatcgggatcgccattttgactatggtgtatttctctaacctgtatttcgtgcgttccatcgtggagccgctggccagcatcaacgagacggcccgcctcattgcggacggcagctacggcatccagatcgagaagaagttcgatgacgagatcggagagctcacagacaccatcaatgacatgtctctgaagattaagcagtcggaaaagacccaatcggagtttatttcttccgtctcccacgagctgcgcacccctctcaccgccatcaccggctgggcggagacgattcagagcggtgagctgaaggacccgggcgacgtgcgcaaagggatggacatcatcgtgtcggaggcccaccggctgaccaacatggtggaggagctgctggagttctcccgcattgaggacggccgcttcaccctgtcggtggagccgctggacctgaaagcggaactggaggacgcggtgtacacctacagggagttcttccgcaaggagggcatcgctctggagtataccgagtgcccggaggagatgatccccatctccggagacccagggcggctgcgtcaggtgttctgcaatctgctggacaatgcggccaagcacggcggcagcggaaagcgtatcgacgtgtccatcgcccaggaggggggagagggcgtcatccgcatccgggactacggccccggcatcccgccggaggagctcccacatgtaaagtacaaattctataagggcagctcaaaagcccggggttccggcattggtctggcggtgtgtgaggagatcatcacccggcacgagggcaccctggacatcggaaacgcggagggcggcggctgcctggtgaccatccggctgccaattgaaacataagttctattcccccttgctattccggccctgatttggtagaatagcgctgagcctgtccttcaatgaaaaggagaaccaagatccatgcaagaaaagcaagaagaaacacagcagaactgtgcccggggcagctgctccaagggcttcaagaccatgtgcggcggccaggccctcatcgagggcatcatgatgcggggcccgaaaaaggagtccgtagtggtccgccgccctgacggcggactggagatccaggagagggagctcagattcatccgggaccgctatccggtgctgggctggcccctgatccggggagtagtcaacttcggcggctctatgtacagcggcgtcaaggcgctgatgtactccgcggaatttttccccgaggacggggaggcggaagaggaggagccctccaagttcgaggtatggctggagagcaggctgggcagcgagaaggcggcctcctttttcctgactctggcggtcatcttgggcgtgggcatgtccatcggcttgtttttcctcctgcccaccctgctgggcaccgccgtgaccctgttcacagactccatgctggtgcgcaacgtggcggagagcctgctgaagatcgtgatttttgtgggctatctggtactctgctcccggatgaaagacatccaccgggtgttccagtaccacggggcggaacacaagactatcttctgctatgaagcgggcctgcccctgacggtggagaacgtgcgcaggcagcccaggcaccatccccgatgcggcaccagcttcctgttcatggtgatcgccatctccatcctggtgtccaccgtggtgttcgccatctggccggtgcacaacccgatcctgcgcttcctggcccatctggccatgctgcccctgatcgtgggcatcagctacgagttcaaccgctgggccggacggcacgacggccccatcacccgcattctggtggccccgggcctgtggctacagaacttcactacctttgagccggacgactccatgatggaagtgggcatcaaagcgctggagctggtcctgccggagaagcagggcgaggacgcctggtaaagcaccggaggcgcttggttgaattaggaattttagctgttgtggggagccttccagttggagggggggggttcctgctgcgggagccttggagagcgtggcggggaatcaggaccggaccgtgtgcggcggagctggacaaaataattcctcattcctaattgaaaaaatggggggagctgaatggcgacgacctataacaacctatacctggacacccgggcgcggctgagaaaggcaggcatcgacgccgcccagctggaggcccgggaactgctgtgctatgcctctgacaagagccgggaacagctgtaccgggacatgtccctctatgtttcggcggagctggagcggcgggtggaggagctggtccagcgccgcctggcgggggagccggtagcctatatcgtgggggagtgggagttctatggcctccctctggatatctccagcgacgtgctcatccccagaagtgacacagaggtgctggccgaacgggctatcctccgtgccagagcggcaggcgagggaggccgggtgctggacctgtgcgccggcagcggctgcgtggggctggcggtggccgccaatgtgcctgcctgccgggtggtgctgggggagctgtcggaaggagccttgcgggtgtgcaagcagaacgtccgccgcaacagcctgaacgcccgggtcacctgtgtcagcgtcaatgccctggagcccccggcctctgccctgtgggactttgacatcatcgcctgcaacccaccctacatccccactggagacatcccgggcctggatgtctccgtgcgggactatgagccccatatggccctggacggcggggcggacggcctggatttttaccgggccgtgacccagaagtggaaaagcgccctgcggctggggggcaccctgatctttgaggtgggcatcggacaggcccccagcgtggaggacatcctggcccgaaacggctttgaaggcatacagaccaccgcagacacccaggggatctggcgggtggtagaggggaccgtgaaccgttaatggcatatggaaagacgaagaaatggatgataggcggggcggcgctggcggggaccgcggtcctgacggccgccctgtggcagggactgactctgcgccgctacgccttgcatacggacaagctttccgccccagtgcgcctgctgctgctcaccgacctgcacagcacattttatggacgggcgcagcgggggctgctctccgccatccaggcccagacgcccgacgccgtcctcctggcgggggacatggcagacgactcccggggcgacgccggggtggatgccctgatgtccgccctgggtggggcatatccctgctgctatgtgtcgggcaaccatgaggtgcgcaccggctgtttggaggcgctgaagaggcgcttccggagctgggggatcaccgtgctggagggcagcggcactctgttggcgacgccggggggcacactccggatctgcggggtggacgacccctccgcctttgccggcgagtcggggtggctggagcagttccgggcctgccaggcgctgacgggggacagccggtacacagtgctgctctcccaccggccggagcggacggaatgttaccgggacagtggattcgatctggtggtgtcgggccatgcccatggcgggcaggtccgcctgccggggatgatcaacggcctgttcgccccgcaccagggggccttcccggactacgccggcgggctctacgccctggggagcaccaccctggtggtgagccgggggctctgccggaacctgctgccccgggtgttcaatccccctgagctggtggcgctggatctgctgcccgcagaggacaaggcgctgtgaaccttaagagaaaagtgggcccggagacggctgcgccgcccccggggatggaaaggatcgatcagaatggctgaaaagaaaaagagcgtggagtctgcctcccccgcctctgataagaagaaggctctggagaccgccatggcccagatcgagcgggcctatggcaagggctccatcatgcgcctgggagagaacgcaggggtggtggtggacgccatccccaccggctccctgtccctggacatcgccctggggatcggcggcgtgcccaaggggcgcatcattgagatctacgggccggagtcctccggtaagaccaccctggccctgcacatcgtggcggaggcccagaagcgcgggggcgaggtggccttcatcgacgcggagcacgccctggacccctcctatgcccgcgccctgggggtggacatcgactccatgctcatctcccagccagacaccggcgagcaggggctggagatctgtgaggccctggtccggtccggtgccatcgacgtggtggtggtggactcggtagccgccctggtgccccgggcggagatcgagggggacatgggggacagccatgtaggcctgctggcccggctgatgagccaggccctgcggaagctggccggctccatcgccaagaccaactgcatcgtcatcttcatcaaccagctgcgggaaaaggtaggggtcatgtacggcaatccggaggtgaccaccggcggccgggcgctgaagttctacgcctcggtgcgcatcgacgtgcgccgggtggaggcactgaagaacggcggcgaggtcatcggcaaccgcacccgggccaagatcgtgaagaacaaggtgtccccccccttccgggaggcggagttcgacatcatgtacggcgagggcatctccaagtggggcgagctggtggatctggccgtcaagctggacattcttcagaagtccggctcatggttctccatgggggagacccgcctgggccagggccgggatgcggtgaaggagtacctgaaaaataacccggagctggccgaccgcatcgaggccgaggtgcgggccaactccttcaagctgatgagcaaacagtcccagatcgccgccagggccgcaggccgggcggtggacgtgtccgccgacgactttgaggacggggcggacgggcagtaagccgtggtcatccaggatctgaagccctcccggcgtgtggagggccgctggctggcggtgctggaggacggctccatcctccggctgggggagggcgaggtggtggacttcgccctctatgccggcaaggagctgtcggagggggaggccgaggcccttacccaggcggcacgccggagcggactgcgccagaaagccctcaacctgctgacctccaaacccatgtcccgccgggagctggagcagaagctccgaagctgggaggcgggggaggaggaggcagccgccatcgctgaccggatggaggagctgggcttcctcaacgacgccgcctatgccgcccaggtggtccgctattactccgcgaagggatacggggagcggaagctgcgggacgaactgtaccgccgggggattccccgggagctgtgggacgaggccctggagggggccgcggacccctccgccgccattgaggagtttctgcggaaaaagtggaggggcacgctccccgatgatccacgggagctgaaaaaggcctctgacgccctggcccgccggggctactcctggtccgacatcgtcgagggcctgcgccgctacggggctgaggcagaatcagatgaataggcagagcggccgtcatcacttgcacgcccagccgcagccctgccagaaaagcggtttgttcctgccatgcaaaggccagaaaatgggcctgctcaaaggtaaatgtcaaggagaatattatgtgtggcacaaaaatatttggggaacggatctttcagatgtggcgaaaggatggcctgagtcaaaaacagctgggagatgtagtcgggctgtctcaccaaggcaatcagcaccaaagtatcgtctgattacctattgggaattacagacgatccctcctggcgggggaaataaggcatccaatgggcgggccgaataatgtcactcgaaggggccaaagagacaatgagacatcttaccgcccaaaaggtggcagaatttctgatataaaattaagaaatattggagcgatacatcatgccatacaaagtagcctttgtatccttgggctgcgccaaaaatctggtgaacaccgagcagatgatggccctgtgccggagagcggggtacgacgtcacgggtgaaacggagggggccgacgtggcagtgctgaacacctgcggcttcatcgagtcggccaagagcgaggccatcaacagcatcctggagctggcggagctgaaaaaggcaggtaagctgaagaagctgctggtggcgggttgcctgacccagcgctaccgtgaggagatccgcacggagctgcccgaggtggacgggatgctgggcaccggcagctataccgatgtggcctccgccgtggcggagctgatggagggggagcggccggagcactttggcgatatccaccgcacctatgaggacggggagcggatggtcaccaccccgccctacaccgcctttttgaaaatcgcggaggggtgcagcaacggctgcgctttctgcatcatccccaagctccgggggcgctaccgcagccgctctatggaggccctggtggaggaggcacggggattggccgcctccggcgtgaaggagctcatcgtcattgctcaggacatcacccggtatgggctggaccggaaggacggctccaccctggccaagctgctggacaggctgtgtgagctggacttccactggatcaggcttcactacctctaccccgaggcggtgacggacgagctgatcgagaccatcgcccgccagcccaagatcctccactatctggatatccccatccagcactgcaacgacgccatcctgaaggctatgcgccgccggaacaccagggcggagatcgaggcgctgttcgccaagctgcggaaggccatgcctgacgtggtgctgcgcacctccctgatctgcggactgcccggcgagggggaggcggagtttgaggagctgtgccacttcctgcgggagcagcgcatccagcgggccggcgtcttccagttctcccctgaggaggggaccctggccgccgccatggagggccaagtggacccggacaccgccgcccggcgggtggaactggtggtggatctccaatcccgggtcatggacgagtacaatgaggagcggctgggcaccgtgatggaggtgctgtgcgagggcttcgacagcgcggaggggtgctacacgggccggacctacgccgactccccggacattgacgggagggtgctcttcaccgccgccggagtgatcccggcgggcaccttcgtcaacgtgcgcatcaccggcatgtccgacggggacttgacgggtgagatcgaggaatgatgcgattttacacggcgtgaggtgtgttttaccgaaaaagacatgggagggtagacgatgcctttggtttgtgataaactgtctatccggctgaaggagcagggattacggaagtatgatctgcgaaaggacaagatcattggcatgtctgcactgggaaaattgcgtaaaaatgagggacatatagacacccggacgattgaggcgctgtgtgaatatctccactgccagccgggcgacatcatagagtattttcccgaaggggaaacggataaaggagatagtaacggatgaataccgccaacaagctgaccctgctgcgggtggtcatgatccccgcgtttctgctggtgctctatctggacgtgcccggcgccagctactgggccctggccatcttcgtggcagccagccttaccgacaccctggacggctatatcgcccggcattacaaccaggtgacggacttcggtaagttcatggaccccctggcggacaagtgcctggtggtggctgccatgctgtggttcgtggagatcggccagatgccggcctgggcggtgctcattgtagtcatccgggagtttgccgtcagcggcctgcggatggtggccgccgacaaggggcgggtcatcgccgccggctggtcggggaaggtgaagactgcctctaccatggtgtgcatcgtgctcatgctcatcccccccgtggctcgggagatcagctccctgtgcgtggcggtcatcgtgctgaccaccatctactccggggtggagtatttcatcaagaatctggatgtgctgtccggaacaaaatgagtgcattttccataatagcctgtattcaaatcagagagccccgtctgtctcaaacagacggggcttttttaccagcccccctcaaagaaagggaatttgagaatgaggcgctgcgatcacagagcatccgggcacggggcaacacgcccccgcacaggagtgggaggaagcggaaaacggccccgcaggccggaaacgctgggcacaacagctaaaatgacacggggagttcccccctctgacttgtatttccagggaatacggcgtaaactagggccagaaatagggtggggagggcataaaatgctgcgtgagtggagatttgaacggacaacagagccagaagaggtgcacaaggcagagctgaaacagagaagagcagatttggcgggcctccagcagcggctgaagcaggcagggctgccggtgatcgtattggtggaggggtggggagcggccggaaaggggagcgtgatccgctccctgatccgggagctggacccccggtttttcaaggtgatcagtgtctccatgcccacagaggaggaacgccgctggcccttcctgaagcgctacgttcagagcatcccggaggcgggaaaggtcctcttcctggactcgggatggatggatgagacggtgcgggaacggctgcggggcggcctgtccgagcgggagtatgcccggaggctggagagcgtgaggatgatggagcggcagctggcggcaggcggctatctgctggtgaagctgttcctccacatcgacagggagcgccagcggaaacggctgaagaagttagccagccacaaggacacggcctggagggctggggaaaacgactggcagcagaacaagaactatgggcggacactggatgccttccaggattttatgtctgccactgacgcaccctgggcccgctggaaggtgatcgacggctcccatgccgtccgggcgcagctggaagcggcggactggctgtaccaccagatctgcaccgccctggactgccggcccgcaacggagcagccgaagagggagtggcccctgctgcccatggaacccctgtcccaggtgagattggatcaggccctgggggagaaggagtaccggaagcagctgaagaagtgccggaaggagctggcggagcttcacaatgagctctaccggaaaaaggtgccggtggtcatcgtctacgaggggtgggacgccgcagggaagggaggcaacatcaagcgcctggcctccgccctggacccccggggctatgaggtcatccccatcgccgcccccacccacgacgagctggccaggcattacctgtggcggttctgggagcgcctgccaaagacgggccacatcgccatctttgaccgcagctggtacgggcgggtgatggtggagcggctggagggcttctgttcggaggcagagtggcagcgggcctatgacgagatcaacgagtttgagcgggagctcaccgatgccgggacggtggtggtgaaattctgggtgcagatcgacaaggacacccagctggcccggttccgggagcggcagaacaccccggagaagcagtggaagatcacggaggaggactggcggaaccgggagaagtgggacgcctatgaggaagcggtggacgagatgctggccaggaccagcacggagcgggcgccgtggcatatcctggagtcggtggacaagcggtatgcccggatcaaggccatgaggctggtcatcggtgccatccggcagacgctggaccggtgagcaaggagaggccccggcggggaggaagccctgccggggcatttcccgtctcagaaggagatgcggagggaaaagagacgggaaaatggaaaaaccgcccctctttttccgaagggcggtttgcggatattgatatttacagcaggccgcgcactggtgggagagtcagccgtgagagtggtcggggtcccggagcaggacctggtcgccggcctggtactccttggcgtagcggccgggggaggtgccggtgagatgaccaaaggtgcggatgaaatgggagttgtcggagaaaccggacagctcccccgcctgctggacgctgaccccctcctggagcagctgccgggcccggaggatgcggctgtaaatgatatactccatgacggaaaagccggtggccgacttgaagatgcggcacagatagtgcttgctgatgaagaacctgccggcaatctgatccagggtcaggggctcagccaggttgtcccggatatagtccaggatgggcgccacccgcaaaaagtccttgttgcggatggcctcgccggcggtggaggcgttgaggacaggggcgacgcggatcagcaggttgagcagggcaatggtctggtggatgtcgctgccgaaggagccgtcgtttttgttgcgctccagggcctgaaacagctcgatgatctcggtcatctcgtcggtggacagggcggcacggcggaagctgtcgtgggtcagctgggtcaggtcggtctggggggtggacagctcggcaagggccttccgaccgatatggaggatataccgggcgtggaagccggtggcgatggtgcggtggagggtgttctccccgatgaggtacaaggtgccccgctggaggggatagacctggtcgttgacgaagatgtttcccgggctggtcagggggagcaggagctcgtagtggtcgtggaaatggaggcggctcatgttccaggtcacattgtgattcagctgtaaatgaaattcaacattggtcatgaaactacctcaaatacccttaaaaaagtgaagtttctggtaaaattgcagagggtttggcttgcccaacttcctttgttgtggtattataacatacgtagtgaagatatgcaaactttttgccaaattagcaaaggaaatccatcggagcctgtgataaactggcctacgatgaaaatgaggcagattgcaattttcacaacaggaagaagagcaaagaaagcaagcgagaccgtacattccaaatcttttgtaatgggggtattaccatgaacaaagtgtacaccttgcacgatgcgatcgcgaaatacgtcgagactggagactgcatctccttcggcggcttcacgaccaaccgcaagccctatgctgccgtggcagagattctgcgccaggggcagggcgacttcaccgtctgggctggtcctgccggcggcgactgggacatgatgatcggagagggccgcgtcaaggcctacatcaactgctacaccgccaactccggctataccaatgtctcccgccgcttccgcgccgccattgagaagggcgagctggcctatgaggactactctcaggacgtggtcatgctggccctccatgctgcctccctgggccttcccttcctgcctgtccgtctgatgcagggctccggcctgaccaagtactggggcatcagcgaggagcagcgcaagaccctggacaaggtggacgacctgaagtatgtggagatggacaaccccttcaaccccggcgagaagatcgtggccgtccccgtgcccaagctggacaccgccatcatccacgtgcagaaggccagccccgacggcacctgcatcatcgagggcgacgagttccatgacgtggacatcgctgtggccgcccgcaaggtcatcgtcacctgtgacgagctggtgagcgacgagtacatccgccgcgatcccaccctgacccgcatcttcggcgagtgcgtggacgctgtggtccactgcccctatggtgcctggccctcccagtgctacaactactacgacaacgactcccacgctctgaaggagtacgacaaggcctccaagtatcaggacgccgaggacgccaaggcccagctggccaaggctgccgccaaggctgagaaggccgccgcggccaagcccgaggacgagaagctggccgaggccgctgcccgggccaagaaggctgccgatgacgccgccgccggcgtggccgtccccgagaccttcaaggactacctggacaagtgggtgtacagtgtgaaggaccacgacgagctgctggacaagatcggcggtgcccgtctgatgcgcctgaagaacgagccccatctgggttattccaccagacactaagagttgggaggtttacgacaatggctgattatacgaagtacaccaagcaggaaatgcaggcctatgccatcgcgaagaacatcaaggagaatcagatcgtcatcgtgggcaccggccttcctctgatcggcgcctctctggccaagcgggtggtctgcccctcctgccaccccatcgtggagagcggcctgatggactgctcccccgtggaggtcccccgttctgtgggcgataaccgcttcatggctcactgcgccgttcagtggcccaacatccgcttcatcggctttgaggccaacgagtggctgcacgacgctgaccggctcatcgccttcatcggcggcgcacagatcgatccttacggcaacgtgaactccacctgcatctatggcaagggcgactatgtcaagccccagacccggttcaccggctccggcggcgccaacggcatcgccaccttctgcaataccatcatcatgatgcagcaccagaagcgccgcttcatggagaagatcgactacatcacctcctgcggctggatggacggccccggcggccgtgagcgcgccggcctgcccggcaaccgcggtccccagatggtcgtcaccgacctgggcatcatgaagttcgacgaggagaccaagcggatgtatctggcttactactatcccttctcctcccctgagatggtccaggagaacaccggcttcgaggtggacgtgtcccgcgcccagctcttcgagggcccctctcctgagatcatccgggtcatccgcgaggagatcgaccccggccaggcctttatcaaggtccccaaggaataagagatcccgctccggaacaccatactaccaacataggaggaattgacattgggtaactattctatgccccgatacttccagaacatgcccgtggtgggcaagcccgtccgcgccaacgcggaaaacgtggctgagctgaaggccatcgaggaggagatccacgcccagatcgtgaagggcctggagaacggcaaggccgacgcggacatgaatgccaagggccagctcaccgccatgcagcgggtgtccctgctggtggaccccggcacctggtgccccctgaacagcctgtacaaccccgagaagaacaagaccggcaccacctccatcgtcaagggcttgggccgtgtcaacggcaagtggtgcgttatcatcgcctccgacaacaagaagcacgccggcacctgggtgcccggccaggctgacaacctgctgcggggcagcgacaccgccaagcggctacgcatccccctgatctatctgctggagtgcgccggcgtggagctggaccagcaggagaaggtgtaccccaaccgccggggcggcggcacccccttctatcgcaactccgagctcaaccagatgggcatccccgtcatcgtgggcatccacggcaccaaccccgccggcggcggctaccactccatcagccccaccgtcctggtggcccatgagaaggccaacatggccgtgggcggcgccggtatcgtgggcggcatgaaccccaagccccacgtggacatggaggccgctctggcccagatcgaggccaccaagggcctgcgggccgatcctcccggatctgtctccatccacttcggacagaccggcttcttccgtgaggtgtacaacacccaggagggcgtcatcgccggcatcaagaagtatgtggatatgctgcccagctatgacctggagttcttccgcgtggatgcgccccagtctcccgccgtctccgacgaggagctgtacgacctggtgctcaacaacaagaaccgtccttatgacatgtactccgtcatcgcccgcctgttcgacggcagccagttcatggagtacaagaagggctacggccccgagatgatcaccggtctggccaaggtggacggcctgttggtgggcgtggtagccaaccagcagggcgtgttccccaactaccctgagtacaagatggagaagtacggccagtccatgggcgccggcggcaagctgtaccgccagggactgatcaagatgaacgagttcgtcaccctgtgcgcccgcgaccgcatccccatgatctggatccaggacaccactggcattgacgtaggcgatgacgccgaggtcgccgagctgctgggtctgggccagtccctgatctactccatccagaccagcaagctgcccatgatggagatcaccctgcgccgcggcactgccgccgctcactatgtgctgggcggcccccagggcaacgacaacaacgccttctccctgggcaccgccgccactgagatcaatgtcatgaatggcaagaccgccgccaacgccatgtacaccggccgtctggccaaggatcagaaggcgggcaaggatctccagcccaccatcgacaagatgaacgccctgatcgacgactacgatgtgaagtccaagcctctgttctgcgcccaggccggcctggtggacgagatcgtggacatgcccatgatgcgcaactacatcgtggccttcactgatgctgtctatcagaaccccgagtccatctgccccttccatcagatgctgctgccccgtaccatccgggactacgacaacctgaagaagtaagggcctttcccacacaaatgcgccccctccgcccgggccacagccggtcccagcggagggggagagcagcggcccggcgcaggtgtgacagcgccgggggtcctggagaaagcagtctccggcgggaccacacaatttctgacattggagcgaaaccatggataaaatttacacgctgggcatcgatatcggctccaccgcctctaagtgcgtcatcctggcggatggcaaggagctggtcagcaagtccctcatccccgtgggagcggggaccagcggcccccagcgggccatcagcgacgtactggagaacgccgggctgaagcgggaggacatgggctatgtcctggccacaggttacggtcgcaactccatgctggagatcgcagaccagcagatgagcgagctgagctgccacgccagaggagccagcttcctttttcctgaagtccacaccgtcatcgacatcgggggccaggatgtgaaggtgctccagatcgagaacggggtcatgaccaactttgtcatgaacgacaagtgtgctgccggcaccggccggttcctggacgtgatggcccgggtgctggaggtgaaggtggaggacctggggacgctgggggcgcagtccaccaagaacgtgtccatcagctctacctgcactgtctttgccgagagcgaggtcatcagccagctgtctctggatactgacaaacgggatatcatcaacggcatccaccactccgtggccagccgggtggcaggccttgcccaccgggtaggcgtccgggatcaggtggtcatgaccggcggcgtggcacagaacaccggcgtggtcaaggcgctggaggaggaactgggccacatcatctatacctcgcccctgacccagtacaacggggctctgggggcggcgctgttcgcctatcagaggtatcagaaggaacaaaagggatgaaaaaagtcctgttcggtatcgcactgatcctgttcgccgtagtactgctgttgtcagggatatggctgccagtcataagtgacctgatggatagaacggagtttgccgtccttgtcgcggccatcggactggtgattgccgggatcggcgcgtttaccagggagaaatgatccatttcgggctgttttcccagcggccctgcaacattgaaacattgattttctagtgaatctagtgaggaggagaagaacaatggctaaaactgtaagccccggcgttcaggcgctgcgcaaggtcgtcgaggatgtgtacgccgacgcccgcaaggccaaggccgagggcaagctggtgggctggtccagctccaagttcccctgtgagctggccgaggcctttgatctgaacgtcatgtaccccgagaaccaggctgccggcattgccgccaaccgggacggcgagatcatgtgcaaggctgccgaggacttgggctttgacaacgacatctgcggctacgcccgcatcagtctggcctacgccgccggcaagcgtgcttcccgcaaggtggacctggagaccggtgagtatgtcatcaaccccaacagcggcaaacccctgaaggacgagaacggcaacgtggtcattgaccccgagaccggcaagcccaagaaggaccccaagaccatgcagccctacacggtgctggacgacatctatgagatcgaggccctgcctgagggccgggagaaggagctgcggaaggcggctatcaagccataccgccagatgcagatgcctcagcccgacttcatgctctgctgcaacaacatctgcaactgcatgaccaagtggtatgagaacatcgcccgcatgcgcaacatccccctgatcatgatcgatatcccctacaacaacactgttgatgtccatgacaccaatgtggcctatgtccgcgcccagttcgactccgccatcaagcagctggaagagctgaccggcaagaagttcgacgagaagaagtttgagcaggcctgcgccaatgccaaccgcaccgcccaggcctggctgcgggtgtgcgattacctgcagtacaaaccctccccttacagcggcttcgatctgttcaaccacatggccgacgtagttactgcccgcggcaaggtggccgccgccgaggcctttgagctgctggagaaggacctggaggaggccgtcaagaacggcacctccaccacccccttccctgagaagtaccgtgtcatgttcgagggcattccctgctggcccaagctgcccaatctgttcaagcctctgaaggagcatggcgtcaacgtcaccgccgtggtgtatgcccccgctttcggctttgtgtacaataatatggacgagatggtccgcgcctactacaaggcccccaactccgtgtgtatcgagcagggcgtggattggcgcgagggcatctgccgggacaacaaggtggacggcgtgctggtccactacaaccgctcctgcaagccctggtccggctacatggccgagatgcagcgccgctttaccaaggatctgggtgtcccctgtgccggttttgacggagaccaggctgacccccggaacttcaacgaggcccagtatgagacccgtgtccagggcctggtggaggccatggaggccaatcaagcgaagaaggaggccgaggcgaaatgagcaccgaggttttgctgaacgagttcaaggagtattccgagcacccctaccgtgtgctgagcgagtacaagaagcagggcaaaaaggtgatcggaatgctgccctactatgcccctgccgagctggtggtggccgccggcatggtgcccatgggcatctggggaagcaacaagaagaccattgctctggctaaggagtactgcgccaccttctactgcaccatcgcccagctggcgctggagatgctgctggacggcaccctggatcagctggacggcgtcatcacccccaccatctgtgataccctgcggcccatgagccagaacatccgcgtggccatgagcgacaagttgccctgcatcttcctggcccatccccagtaccgcaagcccgctttcggcctgcagttcacggtggaccagtacatgcacgtcaagtctgagctggagaagatcgccggcaaggagatcaccgatgacgacctgcgggccgctatcaaggtgatgaaccgcagccgcgccgcccgccgggctttcgtcaagctggccagcgagcactgtgatgtcatctccgccgtcagccgctccgccgtgctgcgctccgcttggttcatggagcccgccgtctacgccgagaagctggaggccctgaacgccgagctggcccagctgcccgcagccaactggaagggcagaaagatcgtcacctccggcatcatctgcgacaaccccaagctgctccagatctttgacgacaacaacatcgccattgccgccgacgacgtggcccaagagagccgcgctttccgggtggacgccagcgaggagggcgatcccatgatggccctggcccagcagttcgctgatcaggactatgatgtcctgctctacgatgagcactccagccagaaccgccggggcgagttcgtggcccagctggccaaggacagcggtgcccagggcgtggtcctgttcatgcagcagttctgcgaccccgaggagatggagtacccctatctgaagaaggcgctggacgaggccggcgtgccccacatcaagctgggtgtggaccagcagatgcgggacttcgggcaggccagcaccgccatccaggcatttgccgacgtgctgtaaagatcccatgcagaaaatcggtcttctgggccgaaacccttgaaaaattcccgctgaagtgatataatgccaccaatttcgggtttctccccctgtgtcccgtcacgggaacagggggagtccgggaaaatggacgtccgattgggaggggcctgcgcccggcccaagccggtgaccataaaataatcaaagaaggggaaagatagactatgaactacaacgtaactgtaaatggaaaagtttacagcgtgactgtggaaaagactggagccgccgctcctgccgctgtcgctcccgtggccgcccctgtggctgccgctcctgtcgccgcccccgcgcccgctgcggcgcccgctcccgcccccgccgccgctccggcgcccgctgctgctcccgccgctgtggccgccggtgagacggccgtcaacagccccatgcccggcaatatcttcaaggtggagtgctctgtgggtcaggccgtgaaggctggcgacgtgctggtggtgctggaggccatgaagatggagatcgaggtttccgcccccgtggacggcaccgtcaaggccgtggccgccaccgtgggcaccgctgtcaacactgacgatctgctggtcaccctgggttaaaagtagggggtacagatacatgcctagtgttgataaagcaattattaacccgtttgaacctctggatgtcggtgaggccctgctggtagccgtgtccggtctgctggtcgtctttgtgatgcttgccatgctgatggcggtcattttggtgatctccaagatcgtgggcgctatcgagggtaagggaaaggctcctgccgcacccgcccccaagtccgctgcccctgccgccaaaccggcggcagcccccgccgcccctgcggtggatgagggtgagctggttgcggtgatgatggccgctgtggctgaggagtccgggatgtcccccaactccttccagatcaccaacatcagtgcggctcctgccgccgctgcccccgcccctgttgctgctcctgctgcggcccccgcacctgctcccgctgccgcccccgcgcctgctgcggctcccgccgctgtggccgccggagagacggccgtcaacagccccatgcccggaaacatcttcaaggtggagtgctccgtgggccaggctgtaaaggccggcgatgtgctggtggtactggaggccatgaagatggaaatcgaggtctccgctcccgtggacggaactgtgaaggccgtctctgccgttgtgggtactgctgtgaacaccgatgacctgctggtcaccatcggttgagaggaggggtgaagtatggaatttctgaaagaagtcatttttgcgattgctggcggttctggctttgccgctctggactggaagaccgtggtcatgctcgtcattgcctgtgtcctgctgtacatgggtatcggcaagggctttgagcccctgctgctggtccccatcgcattcggtatgctgctggccaacctgcccattaccggcttgtttgccgagcccgtctatgatgccgctacccatagtggaacagtaggctttatgtgggtactctatcagggtgtccaatacgccatttacccgtccatcatctttatgggcatcggtgccatgaccgactttggtcctctgctggctaaccccatgtccctgctgctgggcgctgctgcgcagctgggcatcttcgcagcgttcctgatggcgctggtcctgggctttactcccgctgaggctgccgccatcggcgtcattggcggcgcagacggccccactgctatcctgacggcatcaaaattggcggtagagctgttgccggctattgccatcgcggcatactcttacatggccctgatccccatgatccagcccccgctgatgaagctgatgaccactaagaaaatgcgtcaggtcaagatgagtcagctgcgtgtggtctccaaaactgagaagatcatcttccccattgccgtgaccatcttcgtagtgctgctgatccccgatactgcacctctgattggtatgctcatgctgggcaacctgttccgtgagtgtggtgtcacggagcgtctgtctgataccgctcagaacgctctgatcaatatcgtgacgattccgctgggcctgtccgtgggctttaaggctacggccagcagcttcctgactgttgagaccctgtccattatcgctctgggtctgacggctttcctgctgtccactgctggcggcctgctgctgggcgatttgatgtatgttctgactggtggcaaggtcaatccgctgatcggctctgccggcgtgtccgccgtgcctatggcggcccgtgtgtcccaggtggtgggacagaaggagaacccctccaacttcctgctgatgcacgctatgggacccaatgtggctggcgtcatcggttccgcttgtgccgctggatttatgatcaaggtcttcggcggctgatttaaagcgattacagtttcaaacaggtgctcggcacaccggtgcagaccggtgtgccgagtgctttttccgtgcaggaaaagagatgcggcggagagaaaagagggggcatcgagggggaaaaggcggaaaaaagctgggcagaacaggggagaggaggaaggaagaaaaaatttgaaaaaaataaaaatagtacttgccaaatcaaaaaatatgtgctattatttataagctgtcagcgagagatacttctcctgcggtatgcggctgtagctcagttggatagagtgtttggctacgaaccaaaaggtcgggggttcgaatcccttcagccgtaccactcgtcgcaagcgtcgtatcgcttgcgacgagttttttcgtttcattacaaaacttatcgcgcactcactttgctgctcctcgcttccaaaccgaagcccagcgtagcgggttcggtttggtttttggcacagacctgtagccactgcatcttttttgtccacatattccaagttaaaagctatattttgatcttataaacgaggccgaaatgtagcttttctttttatcaatttgtcgaagaaacctccatgttataccgctcatgagcacatgagtagaaaacatggaggctttgttatgcctgagaatatcacttggagaggcaggacgcaatcgggggaaagagaactgcccgccgctccgccccggcgcctggcgcggggggaaacggcgggcagactgcgcctcagggcgcggcaaggtcacatgatatgctcttcggcgcagttgtccagcacacgcatccccatctccttgggtgcggcaacgggaaatttggcaatgctggtctcgtcgaatttggcacacaggcggagctgaggattgaggcgcaggtcctccatatgggacggcctgcgtgctctgcgctttgccataaagatcacccctggcacagtatgccctaaaatccgaccgatgttgcagggaagacggccgctgtgctgggagcagggagagtcaaaacttttccatatgctgaagatccattacaaagacgaccacaccgcccacatcctgcacaacaggggtggcgggcatgagaggagggtaggggtgccccatggggatagaaaagctttggtagaccgtggctttccgttgacccgcccggcgcttcagaatgtccagcacctcatccagacggggctcttcaacgccgatcatgatggtggtgctgtgcttttttagaaatcctccggtggagctgagcatcgtaacaaaaaagccgttttgattcagctcgtagaccgtatcctcgtaatcttccccctggaggatagccaaaaccaatttcccactgtgctgttccatgtaagacctccttgtttgttcccgcagggccagaccaggtcagacccgcttttgaaaattccctaccactgagatgttgtcatccagaatgacaaagatgtttgggtcctgcttctgcagcgccttacgaagctgaagagcttcctttttggagaccactgtgagaagcatctccgtctgctctccgctgtacgccccttctccctcccattttgtaacgccgcggcccacatattcaaagaccagctgctccatctccggctttttggtgatgataagcatagtgaccatcacattttgcaggtgcgcccggtccaagcagagaaaagtaacgcaggtgaacagaatgctgtacaccaccacctgccggtcaaaaaacagaaaaccgaccccataaactgcaaagttcagggccatggagatacggccaacgctcagaagggggtgcttctgaaggcagagcagccccaggatctcttctccgcctccagagcagccagaggtgagggtcaggccggcgccagcgccgcaggcgaggccgccgatgacacaggcggtgagatgctcatcgaacagaccagactgaggaatagggatcagggccagaaaaatactgtaacaggccacacacagggcggtctttgcaaaaaaaagatgtccaaatctggaccaggccagaatgagcagggggacattgagcagaaagtaaatgatgccggccacgtcccccacagactggagagacgggaaaacagagagcaaaaccatgcgcagaagctgtgcgatccctaaaaatccgccgctgtacattccggaaggcagaataatacagttcatggatacggaaaacagcagggagccgacaacaatgagggacatatctttgacaatctggccgctgtgccgccgaagtcccatcgcctgcttatattgtaccatacagtcccacccttatcaatccaatttatgaaatggtcccggaataccccaaagggatattccgggagcaaatctgtaggaaagcggacgatcaggcgggaatcaggccgttgtccaccaggaactgatgggcgacctccttggcgctcatgccgtccacatctacctgagcgttcatggcagccatggtagcctcgtcaatggcaccgtccagcttggagaggacctcggccagagcgggatcagactggatcagatcggcatttacgaagtttacagcgtagtagggggggaagaagcccaggtcgtcctccagagtggtcagccccagcttggagagcagagcatctgtggcaaaggcgtccaccacgtccacctcgtcgttttcaatggcagtgtagcgcaggctggcatccagtccggtgacatccttgaactcggcgttgtactggctttccagaagaggcagacagtcctcgcgctggataaactctacggtgcatcccagccgaagctcaggggacttctcgatcagatcagacagagtggtcaggccataggcctcggcggtctcgggcttgacgctcatcacataggtgttattgaagcccagaggagcggaggtatagatgttgtggtctttcatcatcatatcgctgacagtctgccaaactacgtctttatcggtattcatgggctgggccagcagattcatcagggcggtcccggtgtactccacgaacatatcgatgcttccctgttccaaggcgtcaaagcagacggcggccccggccagaccgaagcgctgatccaccgtgtaatcggtgttggcctcgatcagctcggtatagagctcacccagaatattgacctcagtaaagttggaggtgcctaccacgatggtcttgtcgccgcttccggtactggagggggcagaagaaacagacccgcttccgctgccggaagagccgcaggcggcaagggagagggacagcgcagccgctgtgagagcgcaggtgatttttttcaggtttttcatgacgcaagaaactcctttttcttattttgaattttaaaatcaagagatcagcccagataggctcaggcaatgatggcggcataggatgccgcggagacagcgaccagggcaaagcacagcccgcctgccactgccttgcggcgggtccggacagctttgctgaggtttttgatctggtcctgaggcagcagcccctcgctggtgagggcccgttccacgcggcccaggaggtaatccagagtgagggccatcacagcggaggcgaccgcccccatgacagtcataggataattgagggagttcatacccagcataatgaaccagcccagtccgttggctccggcgaaagcggcgatggtcatggtgcctaccgcacccacggcagcgatacggatgccggacatgatatagggcgtggccatgggcagctccactcggcccagctgctgcatgcgggtcagtccgatgccccgtgccacctcgagggagacaggagagatgctggagatcccggtgtaggtgtttttcagaatggggaggaacgcatagacaaacaccatgaagatagccagtgtctcaccgacgcccagaaaggggatccccatggcaagcagggccatacaggggatggactgcatcacattggcgatgccgatgaccacgctggagacctttttgcttctggtgatgaagatacccagggggacggcaatgatgagggccagaaccacggcgaagcaggtcatggccaggtggcgcaggaattcctccaccagactgtcccactcctctgcatagatcgtcagatagggaaggaaattctccgccagactgtcccaccacgatgcgggggactctatcaatgcgctgctgctgcccatataactccgctcctttctcccgcagtatgctcagggacgaactgcctgctcatagtggccagcagactgctcttggtcaaaaatcccacaagagtccggtcgtgctcgatcacgggtataatgccggacacatcgtagtcgatggtggagatgatctctttgagagtggtatccccctccaccgcgacgtagtcatcggagaggtaggtctcggcggagccagagccgtctttctccgacatcagctcctccagccagaggacccccagcagacggtcccggccgtctaccaccagcaggctgtccacgccgctctggcgcatgatctgcagagcctggagcacggtccgccccctggagatggtgatgggacggcggcgcataatgtcccgggcccggatatactcggggttggcccacagacggttggcaccaataaagtccgtgacatactgattggcgggagctttcaggatccgctccggggtgtcgcactggacgatgtgcccttcctggataatgcagatgcggtcggccagcttgatcgcctcgtccatgtcgtgggtgacgaatacgacagtcttttttgtttttttctggagcgtatggatctcgtcctgcagctcggcccgggtcatgggatccagagcggagaagggctcatccatcagaacgatgggggggtccaccgcaaaggcccgggctactcccacgcgctgctgctgcccgccggacagctgagaggggtattggttgcggtaggtgtccgggtccagatcgaccattcggagcatctcagtcacccgctcagagatccgctcgctggggtagccggcgatgcgcatgaccagcgcaatattttcctccacggtcagatgggggaagaggccgccggcctgaacgacatagcccaccaggttgggcagctgatttgttttgatgcggtccaccggcgtcccattgatgagcagcttgcccttctgcacattgagcagcttgttgatgctcttgagaagagtggtttttccacagccgctggagccgatgagaacaaaaaattcactgtcctgaatggtaagatccacgtggttcagaacgggcctatctttgtacgccatagacacattttgaaactcaatcataagcgtgtctcacgatcccttctttgttatggcggtatcgtaacagaatttcagttaatgtgaccctaggattctgcctctggaattaagagtgtgttagttcaggcagggacccaccgcccgctgggaagaaaaagactgcccgccccctgcaagacgcagggaacggacagtcagggacgcaggtgcagaggtcaggcctcgtcctcctgcttctggcggatcatgcggtagcccacgccgatgtgggtctggatatactgggggtggctggggtccacctccagctttttgcgcagagtggccatgaagacgcggagagagggggtatccgaaaaggcggagctgccccaaatctcgttgaggataaaattgtgggtgaggaccttcccggtatttcgggccaaaaggcagagcaacttgtactcgatgggggtgagatggatctccaccccatctcgataggcacagccggcagcatagtcaatcttcaggttcccgttctcgtagaggctggcttcctcacttaccttctggctgtcatagcggacccggcgcagggcgacccggagccgggccaggagctcgtccacggagaaaggtttagtcagatagtcatcggcgccggcgtccagcgcggccaccttgtcgctgtcctcgctccgggcggagatgacgatgatgggcaggttgctccaggtgcggacctttttgatgatgtctaccccgtccatgtcgggcaggcccaggtccagcagcatgacgtccgggcggtaagagagggcgtccaccagagcactggcccctgtcttggcccgatggaactgatagttctgggtctccagagtggtggcgatgaggtttcccaccgctgcgtcgtcttctaccataagaatgtgcggcttattcatacatttttacctccgaggccctcagggtgaaacgaaatactgacccgtggggctgatgatcctgaactgatatctcaccgccgtgagcggtgatgatggacctgcacagggagagccccaggcccagcccccgccggccatctccgcgggagttgtccgcggtataaaacatatcaaatattttctgcttggcgctgtccgcaatacctggaccgtcatcggagacctcgacctgcacaaaaggaccggcccggacagcggacaaggagatgtgggaaccggcaggggtgtacttgatggcgttgttgaccagattgatgaccacctggacgatgagccgggcgtccatatccgccatcaacaaatcgtcctccagttctacagagatatggtgctgctccgcattgcggtccagatgggacagggcttcatgaaagacctcatccagaagctccgggcggatgttcagagaaacagagccgttgcccatccgggtgagggagagcagattttccaccaggttgatgagccacatagagtcatcgtagatggagcggtacaggtagcgccgcttctcctcatccagcacggccccgttctccatcaggatgccggcgttcccggatatactggtcagtggggtgcgcaggtcgtgggagatggcccgcagcagattggcgcgcagggtctcctgatgggccagctcctcgatctgctgcttggcgcgcgccgtcagctccttttccagcgccagtccgcactcgtccaggatggctactgtcagatttttttcaaaggagtccaccttctgagcattggggatggcaatgccaaccaccgccagcaccttgtcagagccgcggaccgcaatgtagaggcatttggagctgggaagggtgtgggtggtagcgccggcgtgcttgttgttgttccagacccactccgccaccgcccgctctgaggaagtgagatatgcagacatatccccgcctttggaaacagggaacagcatggcctcctgctccagtccgtcctcgtcggcggaatagatcaggacgtcccgctccagcagctttttcaactgggtggccgtgaccgccaggatttcccggctcccctccgccttctggagcttctggctggtctccagcaggatctcagtgcggtatgccttttgggcgctctggatggcctgccgtttgacacgggtggtaagagagctgcccagcagcgctacggtcagcatgacggcaaaggtggcgatatagctggggtcgctcatcaaagtaaaataggggtaggtaaaaaagtaattgaagatgaagacggagcagagggatgccagcaggctgtagctgtgccccgtggtggccatggagatggtgaggacgcccaagatgtagaccatgatcacattttcagtggaaaagcccgctcgctggaagagaaagcccacggcggtgcaggcagccaggatcaggagggccttgaaaagatctcggacggagaagcgctcctggagaagatagggctgccaggagtggcgggcgggccgctggacctggtccgggatgatgtagatatccaggtcaggagccagctctcccagacggtccatcagactcttggcgcccaggagggggccgcgtttctggggactgcggcccagcacgatcttggagatcccgctgactttagcgtattccgcgatctgaatggcggggtcatccccgtagaccgtgctgatccgggcgcccagctcctctgcaagatgcagattgttccgcagctgccggcgttccttgtcgctctggccctgaaaggaaggagtctccacgaaaagcgcggtaaaggcgccgtgaaatgcctctgccatcctggcagcagtgcggatgaccttctcgttggagggagagccggacaggcagatgagaatgtgttcccgggccctggggggatatctgtccccaccggagggcttccgctccaggcggtcagcggtcctgcgcagggagagctcccgcagggcggccaaggtctgctcggtcaaaaggtgcccttcccctccgccgatggtcccggcccgcaggcgcgccagaaggtcggagggctccagatcgacaatctccacctggtcagcagagtcaaagacctggtccgggacgcgctccggggcggagaagccggtgatggaggagaccacatcgctcaggctttccagctgctgcacatccatggtggaatagacgtcaatgcccgcgcgaagcagctcggcaatatcctggtagcgcttggcgtggcgggctcccttattgttggagtgggccagctcatccactaggatcagctggggacggcggcggagggcgccgtccaggtcaaattcgccctgccctccaccgggagggatgaggggcgggagccgttccagtcctccggccagtgccagggtatcaggataggcggcgggtgccagaaagcccagcacaacgtccgtgcccgcctcttttgcgcggagggcggcgtccagcatagcgtaggtcttccccactccggcggcgtagccaaaaaagatcttcagtcgaccggaggactcctgttccaaagtgtggtccccgggagtcagcccgtcagggcggggctgaggatcagaacgcaaggtatcacctcgtctcttgcttgggtcgtttgtatattatagtataacacaggtggtatcagcataacattggcatttttgacggggtgtaaagattacattaaggaatctttattaatacagtatttatgcacggaaaattctcttaatctggcgctaatgtccgatgtgatataataagaaataaatgcgggacagcgcgtggcccggctgcccgccctgcggacagccgggccctggatgaacagccgcataggaacatatcagaagggaacaggagcatgatgcatgctgcggggggattctgtgccgtctttcaaacatgaccgtgtcacaccggcacaaatcattattttaggattcctgctgctgatctttactggggcagtgctgctgatgctgcccttttccacccaggagcccggaggggcctcatttggggatgcgctgttcaccgccacttccgccacctgtgtgaccggactggtgctccacgatacggcgctttactggtcaccctttgggcagctggtcattcttctgctgatccaggtgggcggaatgggagtggtcaccatcgcggtggcgattttcatgtttgcgggcaaacggatcgggttgaagcagcggtgggtgatgcaggagtccatttccgcccctcaggtgggcggcatcgtgcggatgacggggtttatcctaaaaaccgcctttttgattgaagggattggggccctgcttctggccctgcggttctgcccgcaatttggtcttggaagaggactttggtacgcggtgtttcactcagtgtccgcgttctgcaatgcgggctttgatcttatgggagtaaactccccgttttcttccctcacagactacgtaggcgatcctttggtgagcaatgtgatcgcttttctgatcataattggcggcgtcggcttcctcacctggaatgacatcagggagcacaagctccactttcgacgctaccggctgcagagcaagctgatcctgaccaccacgctggccctgatcctgacagggctcctgttctttctgctgtatgagttcgaacaggggcagtgggtggacatgtccctgtgggagcggatcaacgccgcgttttttcagtccgtgacaccgcgcaccgcaggattcaacacagtggatctgactggcctgagccagcccgcccagctgctgatcatcctgctgatgctggtgggcggttcaccgggttccacagcaggcggcttcaaaaccactacgctggcggtgatgctgctggggatccgggcagttttccgccataaggagcggccccagtgctttggaaggcgcatcgcagatgagtcgatccgaaacgcctctgccatcttcctgctttatctgctcctgttcctgacagggggcatcctgatctgctgcatagatggcgtacccctgatggcggcgctgtttgaggcggcgtccgccattggtaccgttggcctgtcgcttgggatcacgccggagctctccggggcgtccaggctgatcctgatttttttgatgtatttcgggcgtgtgggcggcctgaccatgatctatgcggtcacggccaaaggcgcaccggagctgtcccaattcccccaggagcgggtcaccataggatgagatcggagaggaacaaatcatgaagtcagtgcttttgatcgggctggggcggttcggccgccatatggcccagaagctccgggaactgcaccatgaggtaatggcggtggaccggaatgaagagcggatcaacgacgccctgccctttgtgaccaacgcacagatcggggacagcaccagtgagcagttcattgcatcgctgggggtcagtaactttgacctgtgcgtggtagcgattggagatgactttcagagctccctggagaccaccgctctgctcaaggaatacggcgctccttttgtgctctcccgggctgcccgggacgtccacgccaaattcctgctgcgcaacggtgcggacgacgtgatctatccggagaagcagacggcctcttgggccgcggtccggtacagctctgaccatgtgtttgactacatcaagctgacaccggaccattccatctatgagacggcagtgccggaatcctgggtaggaaggactgtggtccagctggcggtgaggcagaagtaccgcatcaacattctggccatcaagcgcagcggcacactggagcccctcccaggccccaatcacaccttccagtcggatgagaccctgctgatcctgggggatgaccgggacatccagagattcctgcatgtctgacaagcgataccgaacgcggcagggaggccggtccggccccggagttctgttggtccgcagcggagggggagttcccccaaaagctccctgcttccagtgttttcggaactgtgacaaaataaaaaacttctccctctgcgtgtgtccctgtccggggatgaggtagagagcgggacggcagaatacgaccgcatggcgccacggcgtcatgcggtcgtattttgatgatgctgacgcttgtctagaggctgtccccctgggacggtatatccgctcgccggaggtcagacaggcgctgttccaggacgatgccggcctgattcaggatcccgcggatcagattctgctcaaatgcctcggggagcggatagtcatcgcaggggatgcctacaacagcctgaggcccgccatggcttcgtactgccaggtaaaggcatctggaattgggcagggtgtgggtccctgccccggcgtgcttgttgtttttacacacccagtcggccaccgccttctcctgcccacccgtatagcgggagaggagatcggactctgtttccggataaatgcgggcctgcatcagctggccgtccgggtccatggggtagtagaggatcggcctgtcgagcagctttccaagctgagagaccgcgatggcgagcacctcatgttcgccagatgcctgctggagcagctgggtggcctccaaaaggacctcggtgctgtagtttttctgtaccgccatcctggcctgcgtcttgatccggatggtcagagagctggtaagaaagctggagaggaacatgataaaaaaggtgatcacatagctgggatgagcatccaagctgaaatagggctccgtaaagaaaaagttgaaggtaagcacactgagcagcgaggagagaatgccatagaggcggccctctgtccaggtggcggtgagaagcacccccagaatatagacggtgacaatattggtctctccgaagcccagacgggaaaacagctcccccagaagggtggctgcggccaaaatgcccagcatttttccggtgtctttccaggagaaggagagctccgagggggctatcttccatttggggcggtaggcaggctgtcggtccgggataatgtagacatccagatttggtgccagctcggtgagccggtctaccagggctttcttgttccaccagccgcgccgccggcggtggttggtgcggccgagcacgattttggtcacgccgctggtcctgctgtagtctgcgatctgggcggcggggtcatcaccatatactgtggcgatccgtgcccccagatcttccgccagcttcagattggccctcaggcgcttccgattttcaccgctgagctccctggtatccggagtctccacgaagagagcggtaaaatctccttgaaaggcctcggccattcgggcggcggtacggatgacttttgcattggagggggcgctggacagacagaccaggatatggtcgctggggttgagaaagccctccggatgttgctttcgggcggtgcggttgaggcggtcagcggtccggcgcagagcgatctcccgcaaagcggcaaggttctgcttggaaaagaagtggcccagggcttgctgagcctgggcggcccggtagaccttgccctcctcgagccgggcgatcaggtcgtccggctccacatccaccacctcgacttggtcggcggagtcaaatacccagtctgggatccgctcgttgaccgttacaccggtcaagctggaaacgaggtcgtttaggctctccagatgctgaacattgacggtggtgtacacatcgatcccggcgcgcagcagctcttcaatgtcctgatagcgcttgacatggcggcagccctgtgcattggaatgggccagctcatctaccaggatgagctggggcttgcgggccagagcggcgtccagatcgaattcccgcagggtgatgcccttgtaggatacgaccaggggaggaaggcactccagaccttccaccagtttcatggtggcgggtctgatatggggctcaatatacccggccaccacgtccacgcccatatctttcatctggtgggccatctccagcatggcataggttttccccacgccggccgcatagccgaaaaagatcttgagcctgccctgccggacccgcgtttcgtcggggtcgatcattcgaatttttttcagaatttcttccggagttggtcgatgttcttccaagaccatctcacctcccgtgggggatcacaacaggaaacaggatcttcagaaataccttttccgcagggccgccccggataaagtcaaaagtgatctgttttccggaggggtccaggatataaaactgccccggctggttgatgatttggaattccagctcatccagcacctgctgaagggtgagctcccactccatcatgcagaatcccgctccctcctgggcaaactcgtggagccaggcaaactccatgggctgttcgccgtcctgaagaaaaatgcgccagagatgctgcttctgctctaaagagagggcctggagatagtcgatggggctggggtctccctccagggtgaggtagcggtacagactgccgtcctgatcctccaggatctcattttcgtccagaaaagctccggcacggcggtccacagcacagcagcgggcgttatagcggatctggccgagcacatctctgaggcgggctgcatgttctgacgaatccgcctccagctttacacagaggccggagagctggtcaaagggcttgcccgacacacagcgggtacggcagaggatcctgttcccctcctccagatggaaggtgagctccccggtctcgccgccgggggcggtgccatacagagcggtctcccaatgggaggagagacaggccatcagctcacggcactcctcctccaggtagctggtatcacatgcagagtcccggtagagcaggaggagaccttttgtcccctcctgatacagcagagagggggccgcagtaaaaagatcgttgatggtgcagaccagctccagtgccaaaagtcccgccggctgacggagcagagcgcgctcccgcagcggggcgcggtgttcttccgcagtctgataggggtacagcatgtcatgttcctcctttttccttcctatttgcagtgtatgcagaggcaggctgtcaagcttttgatacccgggcaggcgagccccggccgggtggatgccggcagagctcgcctgtctcagagtacttcgttatttgctgacctcgccgatgaggcccagctcctgggcgatggccaggttgacgcctagaacattgacagcctcctcgccgaagatgcccagcaccttgtgggtggtgttggcttccacgatctcttccaggcgctcctcgctcagaccggtattctcagcgagcgcggggatctggaccgccgcagaggcggggctgatgtgggggtccaggccggagccggaggcggtcagcagatcgccggggatgtcccctacggtcaggctggggtggccggacaggaaattgttgatgtcgccctccacgcgctccgccagggcgggattgctgttggcatagttagcggagccagagctcaggccggcgtactcgctgccgtcattgtagtagctcacgccatcctcacccacatagtaggtattgtagtggtactgggagggacgtcccctcataaaccggggatcggtgaactcctgacccacaaagcgggagcctaccggctgaccgtccacatagatcaagttgcctcctgcctgtgaggggaagataaggctgcccaggccggtcatcaggacgggaaagaggaatccgcagatcagcagcaggaccagagtggtcactactgcctggcggatgctgcccgccgcagagcctttgcttgtactcatattgaagaacctccttagaagccgatgaagccgatcatttccagcagaggactgatgatcaggtcgatgatcttgatgccgacaaagggagtgatgataccgccgacgccgtagatcatcaggttacggaccagcattttgctggaggacatgggacggtacttgacgcctttcatggccagagggatcaggcaggggatgatgatggcgttgaagatcagagcggacaggatcgcgctggtgggcgaggccagtcccatgatgttcaacacgcccatctcaggaatggccagcatgaacatggccgggatgatggcgaagtacttggcgatgtcgttggcaatggagaatgtggtcagagatccgcgggtgatcagcagctgtttgccgatctccaccacctccaggatcttggtggggtcggaatccagatccaccatattggcagcttccttggcggcggtggtgccggagttcatcgccagacctacgttggcctgggccagagcgggggcgtcgttggtgccgtcgccggtcatagcgacgatcttgccctcggcctgttcctgcttgatgacggtgatcttgtcctcaggcttacactccgcaatgaagccgtccacgccggcctccttggcgatggtggcagcagtcagggggttgtcgccggtgcacatgatggtcttgatcccgatggcgcgcaggcgctcaaagcgttccaccatgccgggctttacggtatccttcagatagatgacacccagaatgcggctgccttcacaaacagtcaggggggtgccgcccagagaggagacttcgtccacccgtttgcgcagttcggcaggaattttgccgccctgggcggtgacgtacttctcgatggcgtcagccgcgcctttgcggatgatggtgccgtcggggagatccacaccgctcatgcgggtctgcgccgagaactcaatgaagctggacttgggatcgtcctccacctggcagcccagcttacggcccagctctacagtggacttgccctcgggagtgccgtcccgcagggaggtgaggaccgcgcagcggatcagctcctccttgctggcgccgcccacggggtaaaaatcagcagccaggcggttgccgtaagtgatcgtgcccgtcttgtccagaatcatagtgtccacgtcgccgcaggcttccaccgccttaccggacatggcgatgacattgaagcgggtgacacggtccatgccggcgataccgatggcggacagcaggccgccgatggtagtagggatcaggcagaccagcagggcaatcaaagtggagatggggatctgaacattgttgtacaccgcaaagggatacatggtgaccaccacgatcaggaagatgatggtcagggacaccagaagggtgttcagagcgatctcgttgggggttttcttccgggaggcaccctctaccagagcgatcatgcggtccagaaagctgttgcccggctcagaggtgatgcggatcttcagccagtcagacacaacggtggtgccgccggtgacggagcagaagtcgccgccgctctcccggaccacgggggcggactcgccggtgatggcggactcatccaccgaggcgatgccctcaatgacctcgccgtcgttgggaatgatctcgccggcgctgaccaggaccacatcgcccttcttcagctcgctggaggagacgatggtctgagtgccatcctcgtggagcaggtgtgcctgggtatccttctgggtctttttcagagaggccgcctgggccttgccccggccttcagccacggcctccgcgaagttggcaaacagaacagtgacaaataggatcgcacagacaatgatatcatagatccgcagctgctcggcattggcatcgccgaacaaacctggtacgaaggagagcagcagggtgatgaagaatccgatctccactacgaacatgaccgggtttttcatcatgtagcgggggttcagcttgataaacgcacccttcaccgcacccttcaggatatcaggggtgataaattttgtattctgctttttactcatggttcaaaagccctccttaagcccacagagtcagatgctctgcaatggggcccagcgccagcgccgggaagaaggtcagcgcagcgaagatgtaaacaacgcacaccaggccgatggtgaaggtggcgctgtcggtccgcagagtgccaatggaatcgttgacgaactgcttgcgcatcagggaaccggcaatggccagctggatcacgatggacagatagcggccgaagaacatggccagaccggcggtgatgttccagaagtaggagttgtccgccagaccctcgaagccggaaccgttgttggcagcggaagaggcgtactcatacaggacctgggacaggccatggaagccggggttggtgatgccggccagaccgccttcggtagagaccgccaaggcagagaaggccaggatcaggaaggggtggataatgatgcacagagcggtgagcttcatctcccggccctcgatcttcttgcccaggtactccggggtacggccgatcatcaggccaaagatgaacacgccgagaatagcatacatgatcatgttcatcaggcccacgcccttgccgccgaacaccacattgagcatcatgtgcagcaggggaatcatgccgcccaggggagtcagagtatcatgcatgttgttgaccgtgccagtagtaaaagaggtggtagtggtggtgaacatggcggactgggcaatgccgaagcggacttccttgccctccatgctacccatggactgatccagccccagcttggccaaggccgggttgccctggctctcagaccagtagcagacactcaggccgatgaggaagatgatgcccatggcgaagaagatggtgcggccctcggagccgtaaagcttcgcggtgaagctgggcttgctcaccagttcgctggtcttgaccagatcctgggtggtggcgctgtgctcactggagctggcggtcttacggcggcggtctttgaccatcttgccgaacatgatcacgcaggcgccgggcaggatcatcatggagtagagctccaccagatcgctgatgatggtggggttctcaatgggagtagaggagttggcacccaggaagccgccgccgttggtgccgatgtgcttgatgatctccagcgcggccacggggcccatggcgatatcctgctgagtcccctcaatggtggtcaccgtcacgttgggatcgaaattctgggggacgccctgccagatcaggagcatgccgccgatgatggaaagaggaatcagaacgcgggtggtcaccttgaccaaatcagcatagaagttgcccacgttgtccttgctcttgccagccagtccgcggacaaaggcgatgcaggcggcgtagccagtggcggcggacacgaacatcatgtaagtgatgaccagcatctggctgagataagacaggccggactcaccggagtagtgctgtaagttggtgttggtcatgaaggagatgattgtgttgaaggacagggtctcctccatcgcgccgatgccgttggggttgaagatgggaagaaactgaattctcaggaccagatagccgacaaacaccatcacggcgttggtcagcagaagagccagcgcatactgcttccagttcatgcccttgtcgggatgaatgccgcacaccttgaaaatcccgccgtccacccggtcgaacaccggatcggcgaaggtgcgctggccggaagcaatatgatacagatagttcccgatcgggatgacaatgatcatgaagatgatcactgttaggacaagctgtaacatatgtgttgttcctcctgtgcgaaactcgctttacaaatgacacatttggggtcagaaacgttcagggtgtaccagggcgtaaaccagatagccgcccatcagcacgatgatcgcacctaataaaatcatacccatactcaataccttctctcattcctcgtggaactgatgctcacaccagtcagccagcagctttactgatccgaagcagaccaataagaccgcgatcatgatgacgtctttcatagaaaccatcctttccaaagttctgtttccggaacggacgtattatagcacgcaggggattagcaggcggttaacgtattcacaggagaattaaacttgcattaagaaaaagaaataaaaaagataaaaagaaagaaggacaattggctcctaatacaattttaatacggcggatgatttgcaaatctcacacaaacagggcttgtagtagaatcatttttaaggaagtgatcttgtggaagctctggtactggtgggcgggacgctgcttgtctggaccgtcggattctgggcggtgggccagctggaccgctttttcaaggagaaaaacgctccctgccggagggagcgggaggggcagacccgcagaaaaagaaaagttctgtgccggaacgcgggaaaagcggagggacagaggtaagacaaggggaggggcccagactgtgtttttacatagtctgggcccctcctgtattcgaaacaggtctacgaccgcagaaacaaaaaagtctggccttgctgtatcgattttccgcggaagatgggccgggccgctccagcggcttcaattcgcactgcccccgttgctgaccggcagcggtgtgggcagcttaaacgcccactttgcggtgccctgggggtgcaggacctgctctatgagatgtccgccacgcggaagccgggcgggtgcgcggatctgctctgcctgagtctgatgctgtttttcctggaggaaaaggggggggccgggagtggacaaaaaagagattgcaatcgacaatggaatatggtaatatcaacatataaactgtgtcgtatttcgcctggattggtgaaaatacagaaagcgggctggttcagaaaagggaccaggaccgctttctgtgttatttggggaagtgtagattttttaacagaggatgcaggaaatgcgtcacttcaaaaaagcagggaaacttgcaaaaacgcggactgccgcgggacaagacaggaggagcaaacggatgaaggagacaaaacagggggcgctgcccgggacggcggcgcaggccaggcagctgaaggcatggctgaaggagaacggggagaagccgggggcggcgctgcctgccctccagaaggcgcaggagatatacggctatgtcccccgggaggtccagcagctgatcgcggacgccctgcacaagccgctgacggagatctatggggtgtccaccttttactcccagttcaatctggaacccaaggggcgcaaccggatcagcgtgtgtctggggaccgcgtgctacatcaaaggcggcgggcggatctatcagctgctccaggagaaactgggcattggagacgggggctgcaccgaggacggccgcttcagcttggatgcctgccgctgcctgggctgctgcgggatggcgccggtgatgatggtgaacgaggacgtgtacggcagcctgaccggcgacgagctggacgccattctggcgaaatatgagtaaggagggactgagcgtggggcagacggaacacaaaaacattaagatccgcagccggaaggacctggaggccatccgggaacggaccaggcccctcctggaggtggagcggggagcccggatcgtggtgggcatgggcacctgcggcctggccgcgggggccaggcaggtctatgaagccatggcggaggagatccgccgactggggctggaggacgtgatcctggagccggtaggctgtgtagggatctgtcagtttgagcctgtggtggaggtgtaccagcccggaggcgtgcgcaccacctatgtgcacatgacgccggagcagggcgtgcgggtggtgcaacagcacatccggggcggcaacccgctggcggagtacaccatcggggccgtgagaagcgggaggtgaagggaatgtatcgcagctatgtgatgatatgcggggggcccaactgcaccctgctggcgggcaggcaggagaagctggcggaggaattcgaggtccagctgaagctggccggtctgcgtaaagaggtccaggtgatgcggggcggctgtctggggctgtgctccagcgggcccaacgtggcagtgttcccggagggcacgatctacagccatgtccatgtggaggacgtggcggagatcgtcagtgagcatctgctcaagggcggccgggtggaccgcctgctctacaacgagaacgaggccaccagcacagtccgcagcctggaggagacagagttctacaagaagcagctgcgcattgccctgcgcaactgcggcgtcatcgacccccagaacattgacgagtacattgcccgggacggctatgcggcactggagaagtgcctgaccgaactgacgccggacgaggtgatccagatcgtgctggactccggcctgcggggccggggcggagcaggcttccccaccggactgaagtggcgctttgccagcggggaacggggccaggtacagaaatatgtctgctgcaacgcggacgagggcgaccccggggccttcatggaccggagcgtgctggagggcgacccccacagtatcatcgaggccatggccatcgcgggctatgccatcggggccagccagggctatatctacgtccgggcggagtaccccatcgcggtgaagcacctccagatcgctctggagcaggccaggagctacggactgctgggggaggatatcttcgggacgggcttctccttcgacctggagatcaagctgggggcgggggctttcgtatgcggggaagagaccgccctgatgacctccatcgaagggaaacggggagagccccggccccggccgcccttcccggcggtgaagggcttgttccagcggcccaccatcctaaacaacgtggagacctacgccaacatctgccccatcattctgcggggggcggagtggttctcctccatcggcagcgagaagagcaaggggaccaaggtatttgccctgggcgggcgtatccagaacaccggcctggtggaggtgcccatgggcaccaccctgcgcactatcgtggaggagatcgggggcggcatcccccacgggaagaaattcaaggccgcccagaccggcggcccctccggcggatgcatccccgcggagcacatcgacacccctatcgactacgacaatctggccgccatcgggaccatgatgggctccgggggcctgatcgtgatggatgaggacacctgcatggtggacatcgcgaaattcttcctggaattcacggtggacgagagctgcggaaagtgcaccccctgccgggtgggaaccaagcgcctgttggagctgctgactaagatcactgaggggcggggcaccatggaggatctggaccggatcgaggagctggcggccttcattaagagcaacagcctgtgcggcctggggcagacggcgcccaacccagtgctgtccaccctgcgctacttccgggaggagtaccgggagcatatcctggagaagcgctgccccgccggggtgtgcaaggacctgctgacctactccattgatcctgtcaagtgccggggctgcaccatctgtgctcagaactgtccggccgacgccatcaaggggagcgtgaagaatccccacaagattgacaccagcaagtgcatcaagtgcggcagctgctatgaaaaatgccggttcggcgcggtgatccggggatgagggggagtgtgaaaatggaacatgtgagtgtgaatacagtggatgtggtgaacctcaagatcaacgggatcgcctgccgcgcccccgccggcgccaccgtcctggaggcggcccacggagcggggatcgccatccctacgctgtgttatctgaaggagctgaacgccatcggcgcctgccggatctgcgtggtggaggtgaagggggccaagaacctggtgcctgcctgcgtctatcccatcgccgatgggatggaggtgtacaccaataccgagcgggtgcaggcggcacggcggaccaacctgaagctgatcctgtccatccacaatcagacctgcctgacgtgcagccgaagcggactctgtgagctccagcgcctgtgccgggaatacggggtggacaaccagatggccttcgagggggagaagatctgctacgagccggacacgagcgcggtgcatatggtccgagacaactccaaatgcatcatgtgccgccggtgcgaggctgtgtgcagcctggctcagggggtggcctgcatcggcacatcgggccggggcttcgccacccacatcggccccagctttgacagcccgctgagcgagaccgcgtgcatccactgcggacagtgcatcatcgcctgccccaccggtgccctctatgagaaggacaacacgggcctggtgtggaacgccctgggtgacccccagaagcatgtggtggtacagacggcccccagtgtccgggcggggctgggagagatgttcagcctgcccatcgggagcaatgtggaggggaaactggcggcggccctccggcggctgggtttcgacggcgtgtttgacactgatttcgcggccgacctgaccatcatggaggaggccaccgaattcctgcgcagggtccagtccgggggcacgctgcccctgatcaccagctgctgccccggctgggtaaagtactgtgagaccttccacccggacttcatccccaacctgtccacctgcaaaagccctcagcagatgttcggcgctatggccaagagctattacgccgaaaagatgggactgcggccggaggatatctttgtggtgtcggtgatgccctgcacagcgaaaaagttcgagatcacccgggagggggagtgcggcgccggcgcgggcatcccggacgtggatgttgccctgaccacccgggagctgggacagatgatccagcgggccggactgctgttcgcggagctgccggaggaggagttcgacccggccctgggcatcgcaaccggagcggggcatatcttcggcgcctccggcggcgtgatggaagcggcactgcgcacggccagcgagctgctcaccggcaaggagctggagaaggtggagttccaggaggtgcggggcgcccacggcatcaaggaggcggcctatgagatcgcaggcaggactgtccgggtgtgcgtcctcagcggaacggccaacgcgggccaggcgctggaggacatccgaagcggaaagcgggcctatgacttcatcgagatcatggcctgcccaggcgggtgcgtgaacggcggcggccagcccctccagccctctgtgatccgcaatttccgcagtgtgtccgctatgcgggccggcgccctgtaccaggaggaccaggagatgcccctgcggaagagccacaagagcccgctgatccaggaggtctatgagcactatctggaccagcccggcagtcagcgggcccaccagctgctccatacctgctacacagacagaagcggacagcaccgctgaggggaggaggcaccctataacaaaggcgcagggccgcggaactgaggttccgcggcccttgctgttagaagattcaggagctgccggtgggagagcggcagaaaaatcacaatttcccctgtcacccagagacaggatatggtataatggggaccagagacgacaagagccgcccacatccgtgaggagcggagcggaggaaagtgaggtaagttgtggataaccaagagctgaatacccattttatcaaggtcatcggacaccggaacccggacacggactcggtctgttccgccattgcatacagccgcctgaagaacaccctggacccagagcacccctgcaagccctgccgggcgggactgctgaaccgggagacggagtttgtgctgaactattttcaggtcccggacccccagctctacacggacgtgagccctcagatccgggatgtggacatccggcggatggagggcgtggatggggagatgagcctgcgccgggcttggatcaccatgcgggaccagcagatcgacaccctgtgcgtggtggacaaggagcggaacctgaagggcctgatcaccgtgaaggacgtggccacggcgaacatggacgtgttggacacctacatcctggcggagtcagagaccagctatcagaacatcgtggacatcctggacgccaaggtgctggtgggagacatcaccggcaagaaggtggaggggcgcatcgtcatcggctcgggaagcgcggaacagatggagcggtccatctccaaaggggacatcgtcatcgtggccaaccgcagtgagagccagctcaccgccatcgagatgggggcgggctgcgtggtggtgtgcgcgggctgtaaggtgtcccggaccatctgcatgctggctgaggagcaggggtgtatgatcatcagcacccctaacagcacctatgtctccggacagatgatcagccaggccgcccccatccgccactacatggtgcgggacgatctgctcaccttcaatctgaacagctccgtggagtccgccaccaaggtgatggcctccgtccgattccgctacttcccggtgctggacgacgacgggcactacatcggcgtagtctcccgcagaaacatgatgaacctgcataaaaagcagctgatcctggtggaccacaacgagaagggccaggcggtggaggggatcgaccaggcggagatcctggagatcatcgaccaccaccgcatcggctccatggagacagacggcccggtctatttccgcaatgtgccggttgggtgcacctgcaccatcatctatcagatgtaccgggagaacggggtggagctggaccggtccaccgccgggctgctgctctccgccatcctttcggacaccctcatgttccgcagtcccacctgcacccccctggatgagcaggcgggccgggagctggccaaactgaccggggtggacctggaacagtacgccaatgctatgtttgaggcgggaggcgacgtcaccggccggaccgcagaggaggtattcaacaccgactacaagatcttcaacagcggggaggtccgcttcggcgtgggccagggcagctacttgaccgagaagaaccggaaggccagcgaggccctgatcggtccctacctccagaccgcactggaaaagcaggggctggactacattttctacatgttcaccgatgtgcgcaactccagtactgagctgctgatggcgggcaagggtgctgaatccctggtggagaaggcctttgacaccaccgtgacggacgggatggcggtcctgccgggggtgatcagccggaaaaagcagatggtccctgtgctgatcaacgccatcaagcaggagcggggctgaatacacgaaaaaacaggagcgcctggggctgtgggaccctaggcgctcctgtttttatctatgtccgcaggcttgtccgtctcacagctccacaaggtaacgctcatagcaattgaccacccgggtactcccatactgctcctcccgccggatgcctctgttgtaggagaggtgggtgtgtccatgaaggaacagggctgggtggaagaggtccagcaggcggttgaaggtctgaaagccggtatgggccagatcccggcagtccaccatgccaaagcctggggagtgggtcagcaggatgtcgaacccccggttccagagcagcttcggggccagcttcagagcccgcatacacatctcacgctcagtatattggtggggccccctgctgtaccgcatggagccgcccagccccaggatgcgtaccccctgatactcgtacaggcggtcctccacacacaagcagccggcgggtggagtttcccgatacttgccatcgtgattcccgtggacatacaggatggggcagctggcgaaggtggccaggaaggagagatagcgggggtccaggtcgccgcaggagaggatcaggtccagtccctccagcttgccgggggtatagaagtcccagagtgcccgggattcacagtcagaaatagctaagatcttcatggctcgctctgccgctccacaccctggagcttgatgagctcctgagctttttctgtaaattcttcaaattgggggatgcggccctccaccgaggtgagcagccagttcatggacagaatgcggtcggcgggcatgggggcgtcgtcgccatagaccacccggccgctctgatccatcagtacgccgtagaaggggtccagccggtcagccttcagggcctcccgcagtacaccggccagccgccggggcccggtgggcagccgtcgggagcacagcacgctgactacgccctgctccatcccccaccagtagttgaccgcactgctgccctggtcctcctgcttccagctgccttccatcacccggcggaccaggctctggtacagccggccccagtgggtctggatcagggccaggttatgccggttgcccatctgggtgcccgtgctggcggccagccggtccaggtagtcgatatagacaatcccctgggcctggagacgtcccaccgcgccgccgtcccggagatgggcccagtccagatagatgcgggcgttggcgttcaccattcgggctccctgggcgaaggcattgatgctggcgatgctgccgtaggtagggtagtcggctacatagccgatgcagccgtcccgggtcagagtgccggcaatggcccccttgataaacttggccccgtacagccgggggtaataggtgcgcaccgaggggtaggaggtgttcagggagcagttcaggatcttcacatccgggtggagagcggcctgccggacgctggagagcagtagctttggggtggtggtgaagatgacgttggcgcctctgcgcactgcatcctccacggcctggtctacctccccatcggtgcggacgttctcgtaggagagggtgcgcacctgcccatcggtgaagttctccagaatgtgccggccatactcgtggctgtacacccatttggaggcggcggcgctgctgtcgtggatgaaggcggcgcagacccggcccggggtatagaaggagaagcggggctttttcacgtcatcttccagcagcagggcggtccccgcattttccagccggttctggacctccggccggatgcgggacagctcctcacagatctgggagggcatcttgccgcaggactcctgatagccgaagatcttgatgtaggtcaaaaaggccagggagatgcctgtgtagtcccaatccccccggaggtaggcgtcccggaacatataaaagaaggcccggaaggagtagatgtcttccgcactccaggcatcgctgtcggagcggcccagtgcttccagcagttccgggtactcgccgggctggcggaagacgatgaagttcaaacccgtcatcttgtaaaagtccagaaactcgtaataggcggccacctccgggtcgtcagacggcttgggcagcaggcgggtgacagtggccgggatagtaatagcgccgaaatacttcagcacgctgacccgcttgtggccctccatcacatagaagtggttgaggtactccaccaccttaacagggtcccggatgccctcctccaggtggatgcggcacagggcgctccacttggcggcgaactcggtgtccgccgggaggatagggtagaaccctcgggagaaggcgtccccccgaaggtggttgcaggtgccgtcgatctgctccacggggatctccgccagacccagggattcccgccgcaccgccagcttctccggggcatccggcagggtgcgggggcccgtctcctcccccagggcctgggcggctttgacctctttgagtccctggcgcatcgccttgtgatagtcctctgatggcatgccgtgcctccttttgatctggctgtaccgtaccttgtcattgcacgctttgggcctatttcaataacaaggtatcacagaaatgggaaaaattcaattcctttcccccaaaagaagggagaggtgatgtgcggcatgaggcccgacacacgcaagtggcccctggcgtgccgcagggcacgccgggggccgggacatatcagatgtgagatttctgacaggaaaaccagggcttacagggccgtgatcagatccgtggccaccgcggtccaggtcatgatgatggcgttgatgactgcaccggtgtgatagctgccggtctttttgtagcagaaggtagtcaccttgcacgtgatgaaataagtcaggatacagttgagcaaggtggagttggctcgggacatctgcacattggtgatggcagtgtagccagtcatccagagctttccataggcgtagattaggaaaagtgcagcggggatggtgctggtcaaccaaaccagacgagtaaatccggcctccgactgtcctttgatcttcaggccgatggtctggctgaagttaaagacgccgaagaacagcagatacagggggaagtaggtcagaaaaagcccccagcgggtattgttgaggacattgatctgtaccttccagatgcggggagacaggccccagaacacctcggcagcgtaagtcatgacatagacggtgccaactgcgatcaggcccagaagcagggctttgaagaagttgggccaggaagtttttgcgtgagtcaggatgcgttccttattgatggtgccgtcccatttgaagcgaatggccagaatggtgacagtgagcagagcactgcacccgaaccagaacacaaagccgttggtgttgttgatgcggaggacagacttaaagttacctaggaacatctggccgttatagatggcccactggcagatcaaagtgttgataatggcgggcataatcagatagaacaggaagggagcgttgactcccgagaccggggcgggcatggggcggatgatgctggagaaaaagctggtatccagcaaaagagagaggacggggaacatcatgatcagaacagcgatgatgccaatggcggtcccgatttccttggcggcgtaactgatgccttcagcggggatgggagcgggagccagggcctgctcgaagaaatctaccatgtccagaatgggttccttcagcagaagggcggtaggatgtccggaatttccggtgtacaggatgcgggaggtgccgtctcccatgtcataccaggtccccaactcaatggggctggcccccatctgttctgtgaagggctcggcagtggcaatgtcacgggcagaaatcttgccctgtccataggtgttatcccaactgccgataaagacgcccatattgacgccctccagattgaagtttccggcagccagatagaacacagcctttactccctcacggaccacagtgcagtctgggtcggtggtcacagcccacttggcacgaccggtcccggcggagtgccccatggcgccaatgcagtgcgggtccacaaacttcatggacatgaggtaatccatagctgcgcgggaccccacatcgggggtgttgacaatttcagagcggccgatggtatagggatctaccgccataacgacatagccgcggcgagagagctcgatggctacggaactcatattctccagactggcatttccgccgggcagagccagaatgccgggggctggggaatcctccgtggcggtctggggcacatacaatttggcgctcatccggtatccctcatcagtaacgaagtcaatacggtccacttttactgtgccgcctgagatctctgagtaactggctgtgctgaagcctccgataaaaagaaccagagacagaagaatgacccagattcgtcggtcaagtttttttagtttttccattccatatatctctccttgtttggaagcattgggatttgtgctttgacggatgggaaagagtacccggccagatacagctcctgaattcagggtaaaggagctgtctccctttttccagacaaggattttcaaacaggggtaaaatttttctctctttttaagatatgtttccctttgcaaaatttgttctcccggaaagaaaagcgaatacagaaagaatgggcccgcacatgctttatatgcgggcccgtccagcgggaagaaaaagcgggagtctgtcattgtgaggagaccccattctccagaagcaacgcctgaaccaaagactggtccacggagccgaggatctcttccaaaaggggctcggccaactgttgaagggtttcctgatccttaggagttaaatcgtgaatttggagctcgctggtctgctgggtgctgacctcggcctgccgctgattgagaatttggctcagacgggacttcagcacctcctgataatcgctgggaagggtatggaaggcgtcgtaattcatcacgatggcgctgctcatgacgaacaggggaccacgcagggcatagggctggagctgcagaagattctgagagcgcaggatagtgtaagtagtctcaatggcgtcaattccattttcctccaaaatatattccagaccactcagcccaacattctcgatccgctgtacccccagagcatcatagagttgattgtgatagaagctgccgctggtgcggagccgcagtcctctcaactgctctaacgaggtaatgggtgctgtgctggagatgatccagggctcacctgtacgcagatagagcagctccaggccttgctctcggtaagcatggttgagggcatcaaagaatttcccgtcatatactcgaaatggctggatatacgctgtaaagcaggcagggatatccagaatagcagcctccggaataatggaggtacatacggaagtgctggaagctgcaatggagagggtgccgcgctgggcggcctttaccatattttctccctcacctaatacattttctccgtagagcaccagctctacattaccgtgggtgtcctccaaaaccagatcccgccactcctcaaaggattgagtatatccgcttccggaatagccgaccccaaactgataagggacagactgttcctgaatcagatcggaagcggcgtgctgggactgagccggaggcagggaagcaggggcacaacctgagaggaaaagcagaagtgccgctgcaccattcaaaaaggccttagtcattccgattcctcccattttttactgctttcggtatgcaccgggggtggtgccagtgtgccgcttaaagacccggttaaaattttgaagggagttgaagccgcaacggaatccaacctcctgtaccggaattttactctgccgcagaaggagcttggcccgctgtacccggcattcatttacataatttacaaagtttacttcactcagctcataaaacaggcggcttagataagcaggtgtaatgccaacgctgtcagccaccatctccagagacaaatggctgtctacgcatcgctcttgaatatacttctgagcctgagccacatagcgattccggtttttctgaccatagtaggctaggagagacagaccctcggtcccaacccgggaggccaggacgaagagttccgagccggtctgatgctctgcccgacggtagtaggattcaaagagagccagcttctcctcgggcacatgaagattgagaagggcctctaccatgcagtccagcatagcgctgcaattttccagcggagagagggagccggccgcggcatgggctgcctcctggagcaaaacgtcaaaagcccgctttgcaccgtcaatatctccgcttttggccagttccacgcactggcggcaaccgctctgctggtcctgttcctcctccgcgcccgagccgtggtaatgctgataattcagactttccaatgcttcgacataggagtagtgcagattggtgatgccgcggcagggcttgcccctgcccagggtgaacagattctctacatgattctgtctggcgtattcctgtacgattttgctctgctccaattctgccgccttaatctgggcggcggaggcggaatggggaaatgcgaggatcagtaccagggaataatcgtccatcagcaggtactcacagctgtatggctgacaggagacggatggctgaagctcctgggagagcctgcggtacaggtcccccatcagctcatccgggtttccatcatagctgtcatccactgctccagccaatactgcaaagatgccgtccggctggaatgggctgtgcagataggccagccggtccagtagataggtttccgggagttccttaccgcgaagaagatttttgtacagccgctctcggacaatgggggccatttcagccacctcctgggagagggagaccttttggcggagggtgtcctcatagacccggcgaactacctcgagctcgttttctcctccgccatgctccacagtctctacggcggagcggaggatgcggataggacggtagatgctcaaggtgatggcaacggcagcagccaggctgaccgcaccaaagattagcaaccagatcccgatcagctggagcagatcaagaggggagagcttggtctgagacgggtcctgccagagctgaaagctccagccagcatgtcctgtaaaggtttccgcctgggtctccgagggagagtagctgccgacggagaagatgggagcacccgatgggtccaaaatttccatataaacaccggtatctcccagggactgctccaggaaatgaagcaggacatcctcatggatttccaccagaagggcgccgtttttttcaggagtaggaaaatcctggagcagggctaccttaccgtctaaggtgagcacaactgtggaaaaggtttcgtctcctacgacgcgaggctggatgtgggagttgaactcggcaagaaaggcacgctgaggagcatccttgatagggagaatggtcccggaagcgtcgtaaagggcctgattagagtaggtaagcagataggcccggtccaccagagggtagtcctgctgaaaggtagacagggctttgacgatttccacctttctggcataagagacctcgtccggaaccaaaatggcccctgtgatatccgtgttccagaggagctgctgcatagcgcggcccagatccagaacagccagatccacatactcgctggcggtgccaagcagttgcctggcactttcctgggcctggcgctcatagctcctggagatataggagcctataaaaagaaaagaaatcaggaacatgacgcagaccatggagagcagcagaaaaagaatgcggtagaacatcctttttgatctcagattttgaaacagcttcatcagacagccccccttctaaaagtttgttaataataagataccacatataaaggcagccgtcagccctccttcatgcagaatggagatatggagatggggaagagccgaaaagtgcataggcgtccagtggacgcccatgcacctgctatgttttttaaaagttaggtaggactacactgtagcgcgcctgccccggcctgcggtgaccagctgccagagggggagcagaaagaggaagaatgccgtcagcagggaggcggcgggggccccggcggaggccagggggacacccccggcaatggaccaggggatgaggggggccaccaccacggcgctgttttccagatagatggccagcttttcccggcttttctccagaccgccgcacaactggtgggtgagcatgatggacagagtctggttgcaggcgatggcgctggcgaggacggaggtgaccagcactgcggcgtagggggacaggaccgcaccccacgcctcgatgcgtctccggatgggctccagcagcccggtcctctggaaaatgccggagtaggaggaggagaggcagacgatggcccccacctggagcatggagacaatgccgcccccgtcgatcatggtggccagctccgggctttgggcggagaaacccaggacggcgtccttcaaaagggtcaggggggcggcgccctgataggcgaggcagagcaccgcggcagcggcgatgctggccagcatggctgccttcacccgcacccgcagggcagagagcaccaaaatcagagccgccgggatgagggggaggggacccagacgaaactccagggcgaagaggggggcgatgtccgccgcctgaccggcggcgggggaagacaggccgaagagcagatacagcccggcggcgagggcgaaggggaccaggctggtccgcagcatctgccggatgttcccaaacaggtcggtcccggtgaggtcggccaccagcagggcgctggtggagacgggggaacaccggtctccaaagtagaccccggacaggatggcaccaccggtcatcaacgggtcggcccccagggcggcggccatggtcatgcagacggcgcccatggtggccgccgagccgaaagcagtgccagtgaggaaggagaccaggcagttgagcagaaaggagcacaccaggaacagacggggctccattacccggacggaatagcacacaatggccgggatggtgccccccgcccgccagagagaggtgaggatgccgatgaggacaaaggtagtcaggatatttttagcggcccggaccccctgagcggacatacccagcacctccgggagagaaaagccctttcggatggcgtacagggcaaaaatgacatatcccagcagcagggcgaacaggagggagatatggaagatgacgcacaccagcagcgccgctgcgaacagagagaagacaaggagctccatgacgcacctcgggttgaagaatgacaaaaggaggggaggacctactggtcccaatgggaaaatcgtccattgagcgtgggtacggctattataaacgaaatggaggaaaagtacaaggacgggaacgaagtccccgccctgcggcatggcgctgtgttttccggtacgtgcgataaaattcgaaatggtccgcaatatgcaggggcagaaatcgtgcttatcaggtgaaaggtacttttacaggctcagggccggaaagaaagcgggctatggaggaccaagatcatcgagctgtctggatgcggatcgaagaggcggcctgatgttttcatcaggctgtaggaggagccgctgacgaaggctcaggtagacagcagcggcgattggagctttgccagatgtaaggatatcatgatgaccacaaagacgggacctatcttttgtactatgccggccatgtgcagtttatcgcagagacggaagcggctcatacataaagagctttgaaccttataaaaatcatatttatgaggagaaccccatttgtaactccgaagtcgggttatcaatggggttctccatttatacagtttccaaatgcctatttttcatacctgcgcagaagatcaagcagttctgcggcatgttccgcttcatcttccgcaaactcggaaaacagtttggcaagcgccgagctatcctcctcgagttcatgggcataggcctgatagtcccgtacaagttcagttgaattttgccaggccctgagcacatggtcccggttagtaatggtaaaaccatttttggtatccatagaaatacctcctaagtttgatattgttttcgtatctctgtcattagctgccgtttgttcatcggtggcagacaggagtgattccggcacacatagaacgtggtttcttcgttcaacagcttatattcttccgatggatgttccaaaaccttgactatggcatcagatggcagcacaaatggaaggtcgttcaagtgctctccgttcgggactgcggtgatcaaaagcggcggctcccaaaaatctgacagagccattaaaaacatggaatatccggcaggatatcgttccgcttctcctgacatataggcaagctgtttgttcagaatgttctcaataccctgatccggcagcaatgcattcacacgtacaagcacatatgctaggagggagtttccactggggatcgccccgtcatagcactctttcgggtgaaaaagcagcgcttcgttctctgtgccgctgagataaaagccgccatggagcgaatcgtgatactgggcgacagtttccctgataagctgtaccgcacggcgaagaaatgtgcgttccagtgtggcatcatacagagaaagcagagcaaaaatatagcttgcataatcatccagaaaaccgcgcgctcccagtttgccgccccgaatgcttacataaagcgtatcctgatcgcacaggctgttctcaagaaaaccttgcgccctttttgcggcgtccagatatctgggatcccgactgcaccggtacagccggcacagcgccgcgatcataagggaattccatgccgtcaaaaccttgtcatctgtatgcaggcgggtgcgcctccgcctgtattcctgcaatgtgggcagaaaagggtcaaaacgcgcatctgtcaaattttttgtgtggagaagattgggaatgctcttaccctcaaagttccccgcttttgtaatactgaaccgttcacaaaaggcggagccgtcggcttgccccaggagctcgatgatctcctgcggagtgaatacatagtattttccctcctcgccatcgctgtccgcatcctgggcgctgtaaaagccgccgctgggagaggtcatttcattgagaatataagaggctgtcttttctgcaactcccagataaaatgactgctccgtgagatcataggctttgcagtaggcgaggatcagcagagcgttatcatagagcatcttctcaaaatgcggaacaagataataccggtctgtggaatatcggcaaaatccgtatccaatatgatcaaacagtccgcctgcatacatcttttgcagggttgtttccgccatgtttaaggcgcggctgttcccgtgcttttcgtattgctgcatcagaaacagaagattgtggggggctggaaatttcggtgcgccgccgaaaccgccaaatgacgcatcaaagttctgctgataccattgcagggcagtgtccggtaaagttttatctgcttgtgacgcaggagtacgatgctgatggagagcctccgtgattttgtttgcggagcgaagaagggcgtcccgctcgttcttccatttctgctgaataatgagcagcagttctttgagtcctacggccccgtatcgggcagtcttaggaaaataggtcccagcgaagaatggtttctgctctgcggtcataaagatgctgacaggccagccgcccctcccggtgaaagcctgacagactgccatataaatgctgtcaatgtcggggcgctcttctttatctactttgaccgacacgtagtacttgtttaagatatcagcgatttcaagatcctcaaagctttcacgggccattacatggcaccagtggcaggtgctgtagccaatgctcaaaaagatgggtttatcctctgctcttgctttgcaaaaagcttcctcgccccaggggtaccagtctaccgggttttccgcatgctggagaaggtatgggcttgtctgatatttcagatgattgctcaaatcctcacctcagtttttcagatcccccattgcggggccaccgctgccgatgctcactactttgtgttccaatctctttcctaagattgaaaattaggctgattccgagtttgctcctgtagtgatctcatatacttctccccatgatgattctgatgatagtgtggtctaaaaggagaaaagtatgtcttttcttttacgtcccatgatttggtacaaattcataggcggcatggtcgctttgaagggaaaatattgcttttcctctttcccacagccttgcctgcaaatgcacattacagctttcccgaatggtgctggacatctttccgcactgtggcgcacgaagagggtggcccgtatgtggggatgttatatccaactccagcaggaggctgccttgagacagacagatatgttccggggtaaatgcttgaactttgacgcctttgtaggttgccaaacgatactccctgccttggtacacgatcgcgcagatgcatccgcggaaggaacttccgcaaaaggggatatgggcgatcgagatcatgatagaacatgcgctcgggaaatcgttgcactgcatccacaggtaggagcggggaaaagaggttccgctgtccttctctacatagccgagaccaccttcgaagctatgcacatatccatccattcggacgctgccttggagtgtgtgggccatgctgagaacgccgtgccggcactccatggggaaaaaacggaatggccccatgatatcggaacagagcggcgtaagcggtccgtacacgatctcaccgctgatgccgggcagctcaatatggcaaccctggctcgaaaaccaacatcggtccgcctgtatcataccgttacggacggtcagatccgacacctgaaattgtcgggcaccttctcgagagatcagttggataaaatcgccgctctctgcccggccgggaatgaatgctaccatgtcatcccctttttgatgcttaaaataccagccctcaaaacctttttgtcccgacatacgcatgttacagccctcctttgaggaatggactaagtatgcccatatgagcgggatataagacgatctttatttgcttctcaacgaaacgcaggtgcatcctcttttcatgtatatacggtcccaacgcgtcataagcgtacggcggcggcctattttcgaatggataatggattttcaaggcagctcctacctctcatgcatgatatgcacacggaagagagctgcctttcacttctgccggcggttttggatctgatcagcgttttccggaagcatacttgcccatgtgtatgtccagcacccctctgggcggctggatcagggcatcctcataccggcacgtccactggatctgacggctcagctggccgtcctctatgccgtctatggtttccccgtcctgaatggagttgtcatgctccagaatgtaggaagccgcattgtaggcgtggttcactacccagttggggtccattccgtggaagtggtactggaggtccggcaggaacagggtgctcatgcccaccgtgtcgatgagcatatcttcggtgccctcaatgttgaagaaacggacattgaccccgaagcggatgaagcggtccggcccctcaatctggtgggagcgtacatcctccgccagcaggagcttgccgcagttctggaaatagaacgcctcgcaggtggggtacagttccgcaagcgcctccacaaagtcggcgtccaggttggcccgctccagagccggaagcgccgccgccagcatatcggtggccacgacctgataccgacactcccggaagatccgctcccggtcctcctggcagtcccacatctggctcatcaggaaggcgtcaaagcctttgcccttgaacttgtcgcatttcatcaccatcagctgcaccgggcatttgccatcctgaaattccgcgatatgacccaaggcggcaaagccggccatctttttatcacggcagaaacactctacggcaccgatgtgcttttccatcacagcggtcatctcatccttgtccggcatatccaccggctctttgaacagcatctgaatgagataggggccgccgggctgggggccttttttgtcatccaggttctgctggaacacttgattgctcattcgatttcctccttatagcagtagatcatgcggcaatggacaatcactgctttgtgtgtggagttactccaaaaactaaaaaaagagccacgcaaaacagaatcagtccaataaaattacgctctatcagcagttttatggccatgagaagcagaaaaccgcaaatcagaataattataccgttcatttccttcattttcgttctttcggtctgttagcgaacagcttccaccggaactccagttctttctggacaaactctttcggcaggccccgggggttggcgatgagataccatacccgaaaggtgcgcttctccgggtctgtctcctgccggtagagctgatagcccgcctcatcctcctgcgtccactgtcctgtctgccgcttggcctgcacaaagggttccaccacccgatccagttcctccctggtgcggcttgcggcccaggcgtgatccacatcattggtatgggagaggtggaacaacatcgaacccatccagttctttgccttgtgttctggcgttccgcgcaattccgcctgacggcggtactccgccagctgttccgccgttccgtaccgttccaccatctgctcccgcacatagatgcaccagctgtagtcctccggctgggtaaagggggtgcagaccggctggagcgcctctgccgggtccgcctcaaagcggtcgataaagtcgaggtagtgggctttgatcaggggcaggaaggtgtccagcagcccggtgttcagcagcagatcttctgtgagcatccgaaagaacgaaccgcctgttgtcgattctattctgaaagagtagaggtagtcatctccctgcttaatgatacagctgaaacctacctccacatttccatggccgatttcgtagtctatgtagttgtagcggctccgctcaaaccagatctgataggtcagcccgtttttcattttctttttgaagtcgccctttttcagccgtttccagccctttttctccaggcccaggccgttccataggtagtccagagcctccgcaaagatgtccgccgggcgtttttgttccatagctatccccctcccccactgcttatgtctgtgcctcgctgttcctgatcgcatctgctaattgaccgctaaccgtgtctatgtagagatacactccgtcccggtcgcagtggtacaggttggaatagctggtactcccattggggtggatgggattgggctccaccacctcagtggcttccagcaggccggcaccaagctccgccgcggcagtgagggcctttttcagcacagcaagctgtccgttgctccaaagtccctccagatcctccagcacctttgggtcctgctccagatcccggagaagctgtaccacctgcttcggagacaggtacacaccggcacagtagttttcaacaatctgattttttgccggattgggaaaggctgctggcgccacctgtgcccacggggtgaaataccgggcatattccggcttctcctccaccagaaaggaaaatgcgctcccccgggtgtaatagtaatcccggaaaaagccctggatcaccgcaatgtaaaagccatggctcttatcaaacagctcgtctggtgctgtccctgccccgacccgcagggtatccagatatttttccgcatagaaatcctctatcccatgctgtgcggcaagggccagcaccttttcctcctgcccctgctggacccaggtaagtggggtaaaataccatttctgcatttcttccggcgaaatcgggtgaaaactcacatcgtatcccatacacttcctccttagtaatccagtaaaatgggaacctgctgttcctcggcaaaccgcatagcccgccagaacatggagaaggcaaacttggcaagagattccgtatcatactgggtgtgctccgggatgtccgccttgctgtactgtccattcgggcccacggtcccgtctaccgggtatccctccgtgtctgaccaatcaaggatggtgtcctcatcggcctgccacgccagctggttcagtttctccagctccttccgcagtccgcccaaggtggcgatagcggcggtgtcatcggtgggcagagggccttggaacagaaagctgtcggtgaggggaagccaccaagtcgcaccccggaacagggaccacacccgctcctcatctgatgcaaggcgggcgactagaggatgctccccaaagttccagtccttctccacggtggggggcaccggctcatcgtacgtatggcaggcggccaccagcagcatagcgccgaaggcgtcccaatcgggcttgtcggtgtagtagggtttctcattatcttcaggccagggggtgcaggggagctggcccggctgagaaatggcgctcaagatctgatcccgccagttctccaccgccgcctggatttcagctggggacatttcttcctcgttatcagcagcttctccatccggggtgatccggttgaaggtatatccgttttcctccgcccactgctgaacagcggttttccagttgtgagaatagtaccgggtcagcgtcccggcgtaaatgtcaagtcccatagcaatgcctccttttctgttatgtggtcattcttttgctggagcgaacatctggtcgatcttctccagatcgtattccaagatccagtcatgaaattgatgatagagcggcaatagcagcttctgtgagccgcccagcacatccagcccacggtcatcatacaggtggtagagaaacggccctggcccggccagatagacgctggacacaaagccgtttcagccgccgatgtcccccagaatgatttcccgaagaagcagctctggttgaaagctgctcttgctgagatcccagtaaaactgcacttgtgcatgggtatccccatcttcatccagctctgtggccgaaagttgctcatcgggaactgggagccccactcgttgccggataacggtcagcagggactcggcgggttcttcatcgggatacccgtcgatccgcagaagttccggcaccgtcggaaggccccgatagatcgcggcggcccggtccagcgcccc

SEQ ID NO: 13555 - DNA, 720 bp, Unknown
  gut microbiota DNA sequence
aacccgtatccttgtcatgggcatagtcccgtcaagtcatttcgtacagcagggcagcgtcgccctgcaccagttccagatgggagcgcagcgtttccagtccgctttgcaccgcctcggtgggtaaatcccagtccggggcaatttcggcagccagctccgggaggtcccgctcccgcagagctgccagcagtttagacgccagttctccctccagcagagcgcagtccaggttgtcctccgtctggggcgcaggaaaacggacatccagatccagctcgctctcacaccagtcccagatggccatatagaccgcgccggagcagtcgccattggacagttcctgccgccggccgtctttgagaagataaaaggatgcgatctgtgacatggcagttcctcctgaatgttattctttttccatcagcccttttgcctgtatccggatcacatagaaggcccgcacccagtccagttcttgctccatggattcctccaaagccagcaggcggcgctttcccagcctgcgatccagaagggcaaagatacggacaagtggattctcgctgacaaggcttttctcaatgctctggttgtcaaattcgtgaaacgcctcatagaaaaagccgttgtcaaaacagccgtcgttcagcgtcccttcatgggccagccggaagggggccttcgggtcgtcctcgccgacgccctcccgccgcaggg

SEQ ID NO: 13556 - DNA, 992 bp, Unknown
  gut microbiota DNA sequence
aacatttaaagatataaaaaactatatatgcatataaacgtatttgttagtttctttaaataaacataagattttttattcaattggtaccccaaatccaaacgctccatgcaccatacatgtttgggcggaaagctcggctcccgcttccatgcactgcctcagatatggtttggaacaagccccgctggttttcaactctagatatcgcatgagaaaaccagctgcaaaagaatctccggcacctaacgtatccaccgcctgtacaagctttggggtgtgatacaccatctctcttccgtcccatgccatggctcctcggctccccatggttgccacggcgatcccgcacccctcctcgtgtatctgttccagcagggtgcgtacgctgtcctcatcagaatccgaacaggacagaaaacctatgtccagccaagggcatatatgctgtctgcgttcaatatcctcccaggagcgggaaaaatcataggaaaccagcggtacaagcggcttcaacaggggaagctggtcatcaaaatagctgttattgctggtatggaccacttcaaaactgtcaatataagacaggtcggacgctgtcaggcgcagagggtgctcccgaagcaccccacctttattgctgctgacaaaacttctgtcaccgtctatcagatcaacaactgcatagccattttccccctcataagtccggcagcggctgaattccaccccaactgccgtcagggtctcttttatatggtttcctactctgtctgtcccaaatacccccatatatgcactgaagcacccctgaagtctgcaataaactgcaacattcagtgcctgtccccctgggaacatagtggaaatcgtacgatatttgtcacaaacattatctccgatcccaatgatcctcatctgagtcatctcccttaaatcagtatatatatttatattagttttcctttcaaaaaaagtcaagatttaggcag

SEQ ID NO: 13557 - DNA, 45458 bp, Unknown
  gut microbiota DNA sequence
aaggggtgtttttccatagaaaacagccccttccgctccggtccgccggacagaaagggcccggggtgcgcaggcaccccgggccctgttcctcgtgttcagcagccgcagccgttgttgcagccgttgttgttgcagccgcagccgcagttgtttccgccccagccgccgcagcagcacaggatgatgatcaacagaatgatccacaggcagcctccgccgccccagccgttattgcagcaccccataatgagtacctcctaatttatgaattgcgaggccggctcaacgccgctctcaatcctatcttatgcggaggcacgacaaaggtgtgtcacaggtacttctcagcaaagttttgcagcatgaccgccacctgggcccgggtggcgctctcgtccgggctgaggagcatcaggtccgcgtccgagctggacagcaggccggcgcccaccgcccaggccaccgcctcgccgccccagctggccaccgccgccgcgtcctcatagggggtcaggtcggcccgctctgtcagctccagacccaggtagttggtcccgaagctgtaaagcagggccaccgcctcccggcgggtcactgcctgctccggggagaaggtatcctcccccgtccccgccgtcaccccctggtccgccgcccagctcacatagggggcgtaccactggcctgccggcacatcggagaaaacggcggtggaggcgtccatctccccctggggcgcaccggccatgttgtaaaacacggtcacgatcatggcccggtccatggaagccatgggagaaaagagtccgtccccggttccggaaaacagctgctgaaagtagacataatccactgcggagctgtaccagtcagagcgggagacatctgtaaagggagcagccttttctccgctctccgtcttttcaaagctcccctgcacccccaccttggccaggccggagtccatggtgaagacggcggaggtgtcctcccccaccagatagcggtgtccgctcaccagggcggctccggatgccaccgtctggcccgcagtcacgtcgatcaccgccccggtgtggacaacggtgccggcgcccgccgccagctgtaccaccgaaccggtgggcagcttcagctgatccccccggaccatgtcccggctgcgcaggtcggcgctgtaacttccgccgctcccctgctgcaccccgtacccctggttcacctcgtccagcttctggctggccgcctgataggcctggatcagcttttcgtccgccgccttggtcccctgggccaccacggtggggatataggtgtcattgagatagctcagggagatcaggctgtcccctgtgctcagggccagcgccgccccggtcaaggccgcgcaggccagcaccgccgccgccgcgcgcaccatatgctttcgtttcatgtctcctcctcacgctcctcccgctgggtgatgagatagctcagcgtcagcaggctgtcagaaaaatgtacgttttccaccgccacatccggccgggagacgctgatctcccggttggtgaagttccagatcccccggactcccccggccaccagccggtcggccaccccctgggccgccctctggggcagggtgagcaggcccacgctgaccttgtgggccgacagatactcctccagctggtccacatggtacacgttcactccgccgatggtggtgcccaccacgctctcgcccacgtcgaaagcggccaggagctggaagccgttgctggcgaacttgaagttttccatcagggcccggcccaggttgcctgcccccagtaccactacggtgtgaccctggctgatccccaggatctccccgatctcctcccgcagcaggtccaccttatatccatagccctgctggccgaactcaccgaagcagaacaggtcctgacggatctgggatgcggtcagccccatggacttccccagggcgctggaggagatccggatcacgcccttcccctgaagctccagcagatgccggtaatatcgcggcagccggcgtatcaccgccgtggaaacctttgtatttctcttcatcgtgtgatgctccatcctccgtcggcgcccggggcgcctgtctttcttttcagtctaccccatcccggggctgttgtcaatttctaaaatcaggggcacaggtcccccgccgcccgttccctgccccggtcaacggtccgttgattgcttttttctccgtcttctggcataatgccgcttagaaggagggagcacgatggatcaaaaaaagaccggtgcgctgatccgggtcctgcggctggaaaaagggctgacccagcaggggctggccgagctgctgggagtcagcaaccgggccgtctccaagtgggagcgcggactggggtccccggacctctccctgctgcccgccctgtccctccagctgggcgtggatctggccggactgctctccggcggtctcccggaacccgacaacacaggaggaagcatgaaacacattcgattttttgtctgcccccagtgcggcgatctcatcaccgccaccggggaggccgccgtctcctgctgcgggaggcggctggagcccctgcccgtccagaagccggacgaggcccacagcctccagatccatccggtggaggacgagtggttcatcacctccggccaccccatggagaaagggcactgcctgtcctttttggctctggtcaccggcgagcgggccaccgtgatgaagtgctggcccgagtgggacctccagcagcgcatcccccgccggggacacgggatgctctattggcactgcacgcagcacggcttgttccgacaggtcctgtgagcggccgaaggtctgaaggagaacgagcgcgcggcgccctgatgggcgccgcgcgctcgttctcctctctgtctcagttccaaaagtccgtcttctccttcagaccgatggaggcggcccggaacaccgggtccttcccctcccgccgctggctggtgtagtccttcagggcgctgagagcggtccggcccagcaggacgatgaccggcagattgatcagggccatgacgcccatgagcacgtccgccacgtcccacaccaggtcgaactccatctgcgcccccgcaaagaccagcgccgcggcggccagacggaagactgtcagccccctcttcccgatccgctcccgggtgatgtaccgcaggcatccctcgcagtagaacaggttgcccagcagggtggtgaatgcgaagagcagcagggccagggtgaggaagtaaggccccacgctgccgaaggtggtggagagggactgctgcacgaaagcggcccccttcagctgctcagagggcacgatgccggtgcacaggcacatcatggcggtggcggtgcacaccagcagagtgtcgataaagacggacagcatctgcaccaggccctgcttgaccgggtgggacacgtccgccgccgccgcggcgttgggggcggagcccacgcccgcctcgttggagtacagcccccgcttgatgccctccatcagcgcggagccggcgaagccgccgaagatggcccggaagtcaaaggcgccggcgatgatcctgccgaacacctggggcagcatctggaagttcagcgccatgaccaccagcgccatcaggatgtaggtcacccccatgaaggggaccagcaggccggtgatcctgacgatccgcctgcccccgcccaggacgcacaccgccaccaggacggccagcaggccgccccccaccagtgggaccaggctggtctgcgggtcgccgtaaaagctgtatccggacatgctgtcgatcaggttgaaggaggccagcatgttgaaccccccggcgtaggtggcgatcagggccgccgcgaagaccacgcccagccagcggctcttcagcgccgcctggatgtagtaggaggggcctccgtagctcccgccgttcttgtcccgcaccttgtagatctgggccagggtgctctcgataaaggcggacgccccgcccagcagggcgatgatccacatccagaacaccgcgccgtagccgccgacggcgatggcgttggccactcccacgatgttgcccgtccccacccggctggcggtggacaccatcagggcctggaacgcggacaccgactccctggaggagctcttctcccccaccacccggatggactccgccaaaagccgcagctgcaccccccgggtgcggatggtgaagtacagccccaccgccagcagcatgatgatgagcagatagctgtacatgaaatcgctgatggtccctatcatctctccaaacatcgtctctctccttctttctctctgtccgggcagaacggcgcccccgtcagtcatccatggcgggggcgctgctctgcgcggaggagattataccacaaatccgggaagagttccagacgctgccggacttttctcgcattttgtgcaaaaagccgggggcgtcacatcatgcggacgatctccttcttcagccgggcgatgatccgcttctccagccgggagatataggactgggagatgcccagccggtccgccacctccttctgggtctgctctctggccccgtccagtccgaaccggagggagatgatgtgccgctcccggggctccagccggtccagggcctggcggagcagctgccggtccacgtccgcctcgatggggcgcatcaccaggtcgttctccgtccccagcacgtcggacaggagcagctcgttgccatcccagtcggtgttcagcggctcgtccagggacagctccgtcttctgggaggaggtcttgcgcaggtgcatcaggatctcgttttcgatgcagcggctggcgtaggtggccagcttgatgctcttggccggctgataggtccccaccgccttgatcagcccgatggtcccgatggagatcaggtcctcgatgttgatccccgtgttctcgaaccggcgggcgatgtacaccaccagacgcaggttgtgctcgatgaggcgggcccgggcctccgggtccccctgccccaggcgggcgatcagttccccctcctcctcccgggtcagggggctgggcagggtgtcgctcccaccgatgtacatcaccttctccggctggtacagccccagccggaccaggagccgggccgcccgctccctcaccgccatccataacagtctcacagcagttctcctttcaagtcagcgcgccgatgagcgcgcggtagctccctccgtccgagaccggtgtgggagacatggccaccagcagggggcccagctcctccccgcccaccctggcacggtccacccgcaccgccagcagcaggccccggtccacccctacggcccggtagggcagcaggcgcaggcgcccccggagggggccctcccccagccgggccagcccccccgccgggtcccgcaggtcctccggcccgggccctgtccccggcgggaacaggggggaaagggtctccccctccgccaccatcaccggccgcccggagaccgggtcggtcagcgtgttccccgtgtccaccagggcagtgagctccacctgccgctcccggagggagagacgggcggggagcagctcccgggaggcagcggtgtggcggcccgccccccggaagatcagggtgatgaccgcatagcaccccgctgccgagagcaggacgatcttcaggtccatggaggagtagagcaccccgccccccaggctcagcccccgcccccccagcagtccgatggccagcacgcctccgccgaaggcgcaggagagcagaaaaaagatcaccacctggcgcagcaggcggcggcagccgccgaaggcggtgagcaccatcagcaccgccgccgacagccggcagaggggccgccccaggaacccgaagccgggcagaaagagcgccaccgcataaagcccgcccagcagcgcccccagggcgaagcggagccggctcagccgctccccggccagccgggcggagcagagcaggagcagatagtccacaatggcgttgagcaggaacaaggtatccacatagatcacagtcaagccggccatctcctctccgcgcggagccggtccggcccctttttgttctccccggccgccccctggggccggtccgacaagccctattatagagtccgtccatccagaaaaaggtcacaatcgagatgtcattttcaggagaaatcccccgcccctccagtacgggacagagggcctgcccgcctattggtcagaccagcggcggcaccattcccttttcctgaataaaaacagtaggaccgggaggccgtgcggcctcccggtccctgttttggacagagggtgtgcttactgggtggtgatgacccggaccttttcgccgtaggggtctacgtagatagtcaggtcgtcggagtaggcgcggatctgatacagcgggtcatcgccggtgaaccagaccttggtcgtggtgttgtagcaggccaccttgttggacacctggtacaccttgccgcccgcgttgacgtaggaggcgccgttgctgacgaagaagtcgctgcgggacacgccctccacagcctccagggtgacccgggagcggagcttgccgtcgccgtccaccgcgatgccgccggggacgccgttgtccccgatgtagcccacattggagaagctggtggtgccctccgggctctcgaaccgcagagtgcggacataggagaccttgccggactcatctccttcgacctctctggtgtcggagaagaacaggccgtactgataggcgtcgccggtggcgccctccaggatgataaagtccaccatgtcggaggagttcaggtgataggtggcgatcttgtcgccggggatggagtgggcctggatgtcagccagctccagctggaccaccgtgctgccgctgacccgctcgaagacgtggacgccggcggtgacgggatagctgcccagtgtcattttctggaggtcgaagacgccgcccacagagcggtcagacatgcggctggcgctgatgactcccgccttggaggaggagaccgtgaccagctggtccttcacgctgtcggagaggctggaggagctcttcagctcgatggtgccccccgcggggaggaagaccttgacggagctgccttcggccaggccgatggcggtggaacgggtcttggctccgggctccgccatgccggccacgttgccgtccgcagtgagaagcaggactaccgtcttgcccacgtcaaagctctggatggattccagggcgctctccaggacggtgaactcgtgtcccagcaccgtgatcttctggggcgctctggggttgggctcggcgctctcgtagacgcagggcagccgcaggtcggagacgatcagcttattggccacgctgtcgtaggtgaccacgtcatagggctggatatcagccatggtgatggtctggccgttcttctcgatggtgtagttggacgcgccgccggtgagctggtggaacatggcctcggtggcggtgccggagaccaccaccgcgtcagtggaggcgccggaggagccatagtacaggcccaccaccttgccgtccgcggtgtacagggtcacctggctgccggagcgcagctccagatacagcttctcataggtggtcaccgggttttccttggaagaggtataggccggggtgtcgccgtcgatgttgtaccgggtgccgttggtgcctgtgagataggtgggctgggcggcgccggacagggtcacggtgacggaggcggtctcgtcggggaggaaggtgacgatgcggtctttgtcgtccagcaccagcacgccccggcgtccctgaagggcggagggcaccacgccctcctgcgcagggagataggtcccatccgaggtgcggatggcgccctcggaattgttgtcctccgcggtggcgttggcgtccagcaggatgactttctccttcacagaggcgcccagggtctcgtagtaggggcggccggaggccgtcttgcaccgcagggtgttgacaaagagctgggcggtctgggcccgggtgatgggggcgctgtacgcaagggagaccccgtcggtgagccccagggagttggctaggttcagatagccctccggccagacggctccggcgtcggtctcatcgtaggagagcagccggatcaggatggtcaccgcctccgcgaaggtgatcttctcgtcgggggcgaaggtgccgtccccccgcccggagatcagcctggtctgggcctgagtcccctctccgccttcagaggaggagccggagccggaacccgcccctcccaccgtgatggaggcggccaggttgatgtagcccctggcccagtgtgaggcagtcacatcggaaaagatggtgcgggtggtgtacatgggcaccttggactgctgccgcagcagtccaaccagcatggtgcagaactgggcccgggtgagcacatcgttggggcggaaggtgccgtcactgtcgccggacaccgcacccatcagccgcagcacgtccacgttgacggcagtgctgtggtcgttgatgtcggaaaaggagccgccggaggccgccgccggcagggcaagggagagaagtgccgccgccgtcagcagcgcggcgaggatccgttttaatttcatactcatatctcctgtctttctctgatctccaatttcattttgtgttcctgggaaatctctaccttccggagctcccctccctgccgggaaggagcgcacaaaaggatggtgaggtccctcattcggcccgcagggccaccacaggctggagcccgctggccttgacggccgggtacatgccgaagatgacgcccagcgccaccgagaagaggaaggcccccagggtgatgatggggctggggagcagcacatcggtggtggtggacagcagcagctttccggccaccatggtgcccacatagccgatggcgatgccgatcaggccgccgatgctgcagatcatggccgcctcgatgaggaactgggcgatgatgctcttgcgctcggcgccgatggccttgcggatgccgatctcccgggtgcgctcggtgacggtgaccagcatgatgttcatgatgccgatgccgcccaccagcagcgagatgccggcgatggcgcccagcaccagagactgcatgttgctctgggactggacctgctcggcgctgctgttgttgctgttgacgtaaaagcttccgttgtcccggtttccgtcagcattcataggaaacaaaccgttcaggaaagcgtccagctttgtcatggcctccacagtggcctgggcgctcttggccttgaccacgtagctgtcgatgttgtaattgttgttcatggagcggttgaaggtgtagggcaggacgatgatattgtccagctcgttccacccctccagatcgaccgcctcatagtagcccaccaccttgaagggctgtccgttgatggtgatatactcccccaccggatcggtgaagtcgaagagggcctccttggcgccggcccccaggacgcagacggcgttggtcttctccacgtccaggtaggacatctcccgcccgccggccagggtgtagttgttgcacaccccgtactggtcagagcccagcttgatgtgcatggcggtctgccagtcgtagttcccgttgttccagtcattgatgcgaatggttttcgctccatactggactgtagcggtctcgttgatctccacatcaggggtgatcccctccaccaggtcgctcatggtcaggcagtaatcgtacagcttctgggaggtctcattgttggtgtcgtagtagccgtaggcctgtacggtgatcttgttgtcgcccagcttttcaaacatctccatggtctgccggttctggccctggaccacggacaccatgatgaccaccgaggccacgccgatgatgatgcccagcatggtgaggaaggaccgggtctttttcatggagatggacttgaaggccattttgaaagcctgccacagattcattcccaatccacctcctgtgcgtggtccgcaatgatctttccatcggacagccgcaccacccgccgggcggtggcggcgatgccatcgtcatgggtgatgagaagaatggtggtgccctcccggtagaggccccggaggatctccagcacgtgtcggccggtcctggagtccagagcgccggtgggctcgtccgccatgatgatggggggatgggtggcgatggcccgggcgatggccacccgctgctgctggccgccggacatctcactgggccggtggtgggcacgctccgccatgcccaccttttccagcgcctccatggcgatgtcctcccggtcccacacggacaccccctgatagatcaggggcagggtgacgttctccagggcatccagctcctggatcaggttatacccctggaagatgaagccgatctccctgttgcggatgtgggccagctgcttgtcggacagggaggtgacgtcggtgccgttcaggtggtactccccataggtggggatgtccaggcagcccagcacattcatcagggtggacttgcccgagcccgactggcccacgatggccacgaactccccccggtcgatgtggagcgtgactccgtccagagcccggacctcactctccttgccctcgttataaattttgtaaaggtctttgatctcgatcagcatgagagcacctcgatcaatagccggagctgtaatcggtgaccatgaagttgacgaagacctcgtccccctcctgaacgccggaggtgatctccacgttttctgtgtccgagatgccggtggtgacgatgacggggtagaagccgtcctcctccgaggggaactggcgctgctggccgggctcgacctggggcaggtccagctccggcacatcgtccggccgggcgtcccgcttgacgaagaccaccgcctgacggtttccatccgcgtcggagacatatttcaccgcgctggtgggcaccaggatgcagtcactggactcgctggtaacaaaggagtactgcagccaggccccgtccatcagggagccgtcgtagttctccaccgtcagggtgacggggtagttggtcatgccgctgccgctctcagcctttcccatgtcgatggcggtgaccacgccctgataggtggtgccgttccagtccagatccacgtagtccccgggcttgatgaaggagatgttccggtcgtccaccgtgatggtgaccagcatggtggtggtgttggagatgatgaccaccgtgtcgccgctcttcacctcggccccctcggagagggtgcaggaggtgacggtcccgtcgatcggggccacagcgttgaaatccgccagggccttggaggcctcatccagcgcagtctgggcctcctcgatctctgactgcttggcccggatgtcagagtcaatggtggaggaccccaggtagagcagggcctctcccgcctccacattggcgtggtcgagcaggttgcccatgcccaccacggggccgttggccttggcctcgatggtgcgggtctcatagaactcggtctgcccattctggtaggggtagatctgggtgccatcgccggcggtgagcatggcggaggcgtccatcccggcggtgagggtgccggggttgtcaaagaccactacggcctcaaagtggacggccccttccggggatatgtagctgaccttgttgatcttctccactgttccggtgaaggtgcgcatcaccgcggggatggacacgtccacgctctggcccacagagatctggtcctcataggcgtagctgaagtagagggacagcttcagctgcttgtcgttgaccagggtggccaccacggtgcccttggacacgtcctggtcgatctggaactccttcacatcctggagcttacccgcaaagggggcccggatcgtcaggttggcggcatcctcctggaggtcagacaggtccttgtagaggttctccaccttctcctgggcggtcttcaccgcatcctcagcggcctggctgaagatggtgtagaggggctggcccgccgtgacggtttggccgggagcgatgagcacctcctgcacggtgccgccggcgttgagggtgatggcggcggtctccttggccttggcggtgccgctgccggacaccttgctctggatggagccgaggaaggcgggctgggagaagatctccccctcctcgccgccggtgctgaacaggaatcggtagagggcaaagccgccggccgccagcagggcgagcacaacggccagaatgatcaggtttttgaccatctttttctttttccggccgccgttgggcttgaccggaggccgcggagtcgtctgtgcgggtgcgggcgcggtctcggtggtctgaggtgtggtgatctctggcatttcaagttcctcctacgttttttgccgggcaggcacaaggtcaggtgcgagcctgtccagcatgtccattatatgcccagggccgccgggtggcaactacataagaattacaattttttaagattatcttaagaaacgtcctcttctgcagaaatgtgccccaggcaaagtatctctgcttatctagacgaagaacgggcacaaaatgttccagactttaaaaatttttctggccgatgggctggagttgatgcgagggcgcttttcttccgggcagagctggcaggagattgttgacgaattttcttccttccgctacaataaagccagttccctgcctctggggcaggaattttcatcccgccgcagcccggtctgcggctccaggaggtatgtccccgatgtcttctgcccgaaacaaacggctggtggtctccgccctgatgctggcactggcccttgtcctgccctattttaccggcggcatccccgccatcggcaatctgctgctgcccatgcacctgccggtgctgctgtgcggctttctgtgcggcggcgggtggggggccggggtgggactggccgcccccctgctccgctccctgctggcgggccgccccgaattctttcccaccgccttctccatggcctttgagctggccgcctacggcctgatctccgggctgctctaccgccgcctgcccaaaaacgccgccggcgtctatgcctctctggcaggggccatggtgggcgggcgaatggtctggggggcggtgcgggccctcatcaccctggcctcccccacccccttcggcctggccatcttctggaccgaggccgtcctcaacgccatccccggcatcctgctccagctggtgctgatccccgctctggtcctctccctccagcgcgcccgcctctccccagtccaatgacggccctggaacagatgtgcgcggccctgtcccctctggccgggggcggcgggagggtgctggctgccctggacggcccctgcgcctcgggaaagaccaccctggccggccaggcggcccggcagctgggctgccccctggtccacatggacgacttcttcctgcccccggcgcgcaagacccccgcccgcctggcccagccggggggaaatgtggactgggagcgggtgcgggaccaggtcctggtccccctgtcccggggagagcccgcccggttctccccctaccgctgccataccggggcgtatgggcccccggtgtccctctcccccgcccccctggtgctggtggagggggtctacgccctccaccccgccctgcgggacttctaccgcctccggatctttctggaggccacctggccggtgcggcgcgcccgccttctggaccggggcgggccggagctgctggcccgcttccagggggagtgggtcccgctggaggaccggtatttccaggcctgccgggtccgggactgctgccagctggtgctgagcggtcaatgacacgcgccccatccccctgcagctccgccttgcaaagcgcgtcaaggcatcgtatcatcaatagacatcaaacagcttctgttttctgcggtcggaaagaggaggtcagtgatgtacagggtcatcgtgatcgtgctggcgtttatgctgggagttttcattttcttcggagccgactccgcgaaaacccgcggtcagaaaaagtgggtcaacgtgatcggcaccctgctcgtctggatattggcggtccttggggcaggtgttctggtcctgtgctgtctggcggcatgggactactggaagaccggcgatccagaaacggccgtctccttagggatcaccgccgtgatcctcgctgtcgcgatttatgtcctgctgcggtcttatttcaaaaaaacatagccgggaaaacagcctcgtcaccgccccgcaggtcccgatctgccggtgtgtccctgccccgtgcggggcgggcgcggcaggggtgcccttcccccggggccgcaaagcgaacttgggcgtcatggagcagaattggaaaaggtgcagccgaaagatcggctgcaccttttccggtatcacggggcatatgggctcagaccgcctcgtagatggccttcatgcccttataggtcatatagcagtccagcttggacaccgtctcaaagggggcatgcatggacagcacgggcacgccggcgtccagggtgtcgatgttccgctccgccatgaagacggccaccgtgccgccgccgccctgatcggccttgcccagctcggccatctgccacaccacgccggcgccgtccagcacccggcggacataggccaccagctcggcggaggcgtcggaggccccggacttgccccgggccccggtgtacttgcacaggcccatgccgtagttgacaaaggcgctgttgcgcttctcgtacacctccgcgaagttggggtcataggccgccgtcacgtcggcggacaggcagaaggacttctcatagcaggcccgcaggggcacgctctggctctggcacaggtcctccatgaaggtgtcgaaggccctggacttcatgccggacaccccctcggagccgatctcctccttgtccgccagcatgcacacggcggtgcgctccggcgtgcccagctggagcagggcggccagggaggcataggcgcacacccggtcgtcatggccgtaggcgccgatcagggagcggtcgaagccgatgtccaccgcccggaaggcggggacggcgcacagctcggcggagaggaagtcctcctccacgatgccgtacttccggttgagcagctccagcactgacagcttcacccggtcgctgccctcgtcgtcccgcagggggcggcttcccaccaggatgttcaggctctccgcggggatggcctcccccaggggcttcttcacctggtcggtggccaggtggggcagcaggtcgtcgatggtaaacatggggtcgtccggcccgttgcccaccgagacccgcaccacctctccgttcttcagcgccaccacgccgtggagctccaggggaatggtcacccactggtacttccggatgccgccgtagtagtgggtcttgaagaagcccagctcatcgctctcgtacagggggttctgcttcaggtccagccggggggagtcgatgtgggccgccccgatgttgaccccgtgctccaggcctttccggcccatcacggccagcatgatggccttgtcccggttcacctggtagatccggtccccgggcttcagctccatcccccggacataggcccggaagccggcggcctccgcctgggcgatggcccggtccacgcactcccgctcggtcttgcccgcgtccaggaactgcttgtagccggtgcagtacgcctccagcgccgcgccctcctccgcgtccagccggtcccagccgttcttccgctcatagaccagggcccggcggagctgctcgccccgggtcagttctttttcttcactcataaaacagtcctcctttgatctcacaggggcgctttgcgcgcctcattgttctcttattatgccgcgcacgggcgcacactgtgcgcccctacacgatctctttcaaaaactcctctgccttccgggaaaactcctccgcggtgccgcagtcgttgtacaggatatgggcacagccctccgcaaagaactggtccggccgctgggccctcacccgggcccaggcatagtcctccgaaatgccctcccgggccatgatgcgcgccacccgtgcctccgccggggccagtacggccaccgtggtggtgcacaggtcggccagaccgctctccagcagggcgaaggcgtcgatggccgtcaggccgatgccccgggacctgttctctttgaccatctgccgggtgcgctgaaccacggcccgctgggcgatggcgttcagccgctccagcttggccgggtccccgaacaccagggcgcccagcttttttctgtcaatggccccctgtccgtcccggagggggccaaaggccctctccaagctttcctgtaaggctctatcactttccagcatttcgtggtacacggcatcgcagtcgatgaccgcgccccccagtgcctcgatctccttcaggacggtggtcttccccgccccggtagggccggtgatgccgatgacagtcatggtgatccctcccacttcaaatgcggacatgcctcccggagctgctcctccagctcccgggggctgcacagctgcttccggaccttggcgaacctccggccgtcccggtcccgtatcaccacacaactccgctttttggtatagctcccgatttgggaatatggcagggccttcatgcgacccagcaggtcgaaatagatcagctgatctgcgtcgccgtccagtccctcgtttcgcacccgcagataccgcgccagcagccacaggacgaacagccccagaagggccatcagggcaatctgccccggcccccatacgtccagcacgacacacagcgcgagaaagaggaagaggaatttcagcagggagcgccgggcgtgcctgcgctccatacgccaccggaagcgtttccatgtgtactcttccatcgaagcacctcctttccgggccggtcagggggccttggcgatgcggcggcccacccagtaggacacggtgaaaatgaggatcagcagcaccgccgaggcgatgcctccccacaccaccagcaggctgcccatgtaggttccgtccacgatgcacaggggggtgaccagcatcatcgccccgggcaccacgccggagataaactggccgaagagggcgatggggatgctccgggcggcgtcgtccaccagccagaactgccacgccccgcacagcacgctgaggagcaccccccagtggccggccaggaggctgagccagaagggccgcctctgccgcccgcagtccatccccagccaggcccaggtcagcaccatgagccagggaagcagggtgaacagcagcgtccccaccaccgggatggccgtcgagtagacatagcagccccccaggaccaggggaatcagccccatccaggggaaatagtgggaccgcttcactgccctcgctcctttccttggtcaggcctccacgatgtggaagcccgccgctttgttcaggcggttggtgaccgccagcccgatcccgccgctgtccgggcactgggcccagatggcggagacggcggtgtggtcgaaggcccgcagggcgtcgaacacccgccgggcctgctcccccttgtcccccgccggccccaggctcatgacgggccgcgcgccccccgcatacatcggcaggaactcctcaaagcagatgaccccgtcccccggtccggcgtgggcggcgatataggccgcgctccgctccggctccccggtgaccacggtgacgggggccttgggggcgtagtggcggtacttcatcccaggggcccggggcctctcccccgcccccatcagccgggtgaccgccgggtccaccgccacctcccccagggccgcccgcagctgctccagggtgatcccccccggcctcagcaggcgggggggcgtgcatgtcaggtccacgatggtggactccacccccacggagcaggggccgccgtccaaaatggcgtcgatcctgccgtccatgtcctccagcatgtgggcggcggtggtggggctgggccgcccggaggtattccctgagggggccgccaccggcacgtccgccgcctggatcaccgcccggcacagggggtgggcgggacagcgcatccccaccgtgtccagccccgccgtcacctgatcgggcacgttgtcccgccgccggagcaccatggtcagcggaccgggccagaagcgccgggccagctcataggccgccgccgggatgtcccggcagtaccgctccagccagtccgcccccgggatgtgcaggatcagggggttgtcctgggggcggcccttggcctgaaagatccggcccaccgcagcggggtccagcccgttggcccccaggccgtacaccgtctcggtggggatgcccaccaggccgccggcgcggagcaggtccgcggcggtctggatgtcctgttgggagaggcgctttgtctccatccttttccacttcctatctctcttgggcgcgtgcccgttttccgagggttccatccgggcggggcgtgccccctgtgcagcgcacagcggcccggcgcgctgcttcgtcggaccccgttttccccgccggtctccctatggggcccgcgccctgcgtaggggcgggcttggcccgcccggcttcagcggcagggtgtccccaaatggattccgccccgcagggcggaacccccctgacaaatcctgtgactgagaccggcccggtggaaggacgccccctcatccgtcacggcttcgccgtgccaccttcccccctctggggggaaggcttgaggtggggacacggcatatgccgcgacacctttcctctaaggaaaggtgtgtgggagcttctatggggcccctcaagggcttccagcaggcggaagctgttccccctgccggacggagaacacgatgtggagcatatccatcccatagtagtgctttatgaaagagccccgctcctccatcccgatgcaccgagctactctttgggatgcaaggttgctgtcccggatgatggagaatacctcctcaaatttcagggctgaaaaggcatggtcccggcaggcccgggccgcctcaacggcgtagcccttgtgccaggccgtccgctccagaagatagccaacctcgggtatccgtgtgccatctcccagcccctgccaagtgagtccgcactggcccaccatctccccggatgttctctccactgctgcccacaggccgaagccatcctttcgataccgcgcctgctggcggcgaagccattcccaagcctcctggtctgaaaaggcatgctcataggcgtacattactgaccgatcctgaagcatccggcacagggcaggaaaatctctgtccgtcatttcccgcagtatcagtcggtcagtctctaaaatagtctcagccatctcccagcaccgcctttaccagctcctccggcgtccgggccagacagtcggccccctccgcctccagctccgcccgtccgcggaagccccacagcacgccgcagctggtcaggccgccgttcctggcggtgcggatgtccacatcgctgtcccccacgaacagagtatcctccggggaggcccccatctgctccatcagccggtgcagcagagtggggtccggcttggtgggcaggccgggcagggccccctgcacccaggggaactgccccgggtagtagtcctccaccaccgggcccgccagcgcgtgggccttgttggacagcaccgccgtccgcacccccgccgccctcagccgctccaccgcctccggcatcccggcgtagggggcggtcttgtccgccctgtgggcgccatagcgctccgagaactcctccagggcccgggccagcccctccggcgtccgctccggggccggagcaaagcgctccaccagccggggtatcccgttgcccacgaagcgcttgtactcctccaccgtgtggaggggccacccgtgccgggcgcacacccagttggccgcatccgccaggtcgtctatggtattgagcagagtgccgtccagatcaaagatcacattttggaacatagcggcccggcctcactcgtagaccccgatctccatgccccccagctccacccgggtatcccggggaaactgggcccgctggagataggccttcaccgccatctgggcgaatttggggttcaccttctcgtcctccagctccagatccagccgtccgccggggccgtccgtctggccgccgcacaccgcgccgccgtcctccagcacctcgttcagctcgcccaccacgtccgccaggctcttcccctggggcagggcggtatagtgaatataaaaatccatgtcggtccctcccgatcctttcgtcgtcgtttactgggtctgcttcagccgctccgcctggtcggcggcggccagggcgtccatcagctcgtccaggtccccgtccatcacgctctcgatcttgtacagggtcagcccgatgcggtggtccgtgacccgcccctggggaaagttataagtccggatgcgctcgttgcgcatccccgtgcccacctggctgcggcgctcggcggtgaactcgctgctgcgcttctcctgctccgcctcgtacagccgggaagccaggatgcgcatggccctgtcccggttctggaactggctgcgctcctgctggcactccaccaccatgcctgtgggcctgtggatgagccgcaccgctgaggaggtcttgttcacatgctggccccccgccccggaggcgcggaacacctgcatctccacgtccgccgggtccaggtccacctccacctcctccatctcgggcaggacggccaccgtggcggtggaggtgtggatacgcccgccggactcggtctccggcacccgctggacccggtggacgccgctctcgaacttcatccgggaccaggccccgtccccctcgatagtgaaggagatctcctttacccctcccagttccgtcatgttcaggctggccacttccgtcttccagcggcggctctcggcgtacatggagtacatgcggtggagggagtgggcgaagagggcggcctcctccccccccaccccggcccggatctccacgatgacgttcttcccatcgttggggtccctggggagcagcaggacctggagctcccgctccagccgctccagctcctgcctggcctgctgctgctcctcctgggccagctcccgcagctccgggtcggagagcagggccccggcctcttgctcccgctcccgggcccggaggtaggcccggtatgtctccaccaccggggacagctcgttctgctccttgttcagccgggccacctgggcggggtcgtcataggtctccggcgcggccagcctggcctcgatctggctgtatcgggcctccacggccgccagcttgtccagcatgggcatgctcctttccgcttgatgcccgccccaggcggtccaccatgatatattcctcttctgtctcccgtactatgcggaatcccactctccgatacaggcggaccgccgggttccccttctgcacggacagggagacctgacggaccccctcccgctccaaagcatccatcatggcgcgcagcagctctgttccgatgccctggccccggtactccggatacagcgccgccgcaagggagggcgtctcatcgtcgatatgtccgtagtcatccataagccggcaccatacactgcccaccacccggctcccgtccaccgctgccagagcccggtccagcggtccacttccaaatccttggaaatagacccgcagctccggccggtctgccaccgacctgggcggcggagcgtcccccggcgggacgtagatcgcctcatagaggaggtccttcagtgtcgcatactcctccacccgcatattccgaatggtgatctgatccacagctgcctcctctcccccggcccctcaccggtccaggaaaaatgacttgaccagggccagcggctcccgcacatacatgtgcagccgggagggcaggtggctggagggggccgccagggtggagacactgtcatatccggcccgttccgccagcatccgggcccgggtcaggtggaagccgttggagaccaccaccaccccctgggacagatcacagccctctgcctccagcagctcccgggaatagcgcaggttctggtcggtgttgtgggaccgctcctccagaagcagctggtcctcctccaccccccgctccatcaggtagtccgccatgcatcgggcctcggtgacgggctcgttgtccccctggcccccggagaccaccaccgtcaggtccgggtggtcctccaggtagtccagcgcccggtccagccggtcccgcagaaggatggagggctccccgtcgggcattacctggcagcccagcaccaccatcgcccgggggtccccctggatatggtcgtaggagccgtagagcaccgcgccgaacagcccggcaaaggtcacggccccggccagcaccgccgagagcagcagcttctgccagagacagagcttccttcctttataactgctgatctgccgcttcatcctctggcctcctccagctccgccgacaggcgctcccaagtcccgtacagcttcaggatctcctcctccagcgcctcccgctgctcatacagctcctggagcttcagatagttggaggcggcctcctcgatctggagcccaagctcgtacatttgttcctctgccttagccaccgcccgctcggcggcggccacctccttctccaggttcttggtgccgccgggccgccggggcttctccttcttctccgccggcgccgccgcgggggcggggacggcctgggcctgcttcctctcccgggctgcccggtactcgccgtagctgccccggaagtcggtgacctgcccgtcctccagcacccacacccgggtggcgaagcggtcgatgaagtagcggtcgtgggagacgaagagcaggttgccctcgtactcctccaccgcctcctcgatccactcccggctctggatgtccaggtggttggtgggctcgtccagaatcaggaggttgatcttctcgtccatgagcatgcacagccgcagccgggactgctccccgccggacagggcggagaccggcttgaatacgtcctccccccggaacttgaaggaggccagccggttgcgggcggtctgggcggtgcagtccagctcatagagcatggtgtccagcaggctgcgctccgggtggtcgaagtggatgatctggggcaggtagccgatcttcaccgtggggcccatgcggatcttcccctcgtcgggcccctcctcccccatcaggatcttgatgagggtggatttgccggtgccgttgtcccccagcagggcgatgcgctcgccccccaccacctccaggtccaccccggagaacagggcgcgctggccgaaggatttggacagccccttgatggtgagcacctcatccccccggaactcccgctccccgaagcggacctccatcttccgctcccgggtgggcctgtcggtggtccgcatccgctcgatgcgcttctccatggactgggcccgcttgaagatcttgtcgttgcccgaataggcccagatccgcagctgctcggcggccttctccagctgctggatcttggcctgctccttctcatactgcttcagcttctcctggtagcggcgctccttctccaccacatagaagctgtaattgccggagtagaactctgccttcccctcctggatctcgatgacccggtccaccacccggtccaggaaccagcggtcgtgggagaccgccagcacggtgcccttgaacttgtccagatactcctccagccactcggtggccttcaggtccaggtggttggttggctcgtccagcagcaggatgtcggtgtcctccaggatcagccggcccaggttcacccgggtcttctccccgccggagagccggtcgaagagctgttcccgcatccccgggccgatctgaaggccgctgcacaccttgttcttccgggtgtcggtgtcatagccgcccccggcctcgaaggcggcggtgagctggtcgtaccggcgcagcagggcggggtcctccccccgctccatccgggcggccagctgctccatctcctcctccatctcccgcagggggcggaaggcggtgtccaatacatcctccaccgtgtagccggcggggtagaccgggatctgggagatcaggcccacccgcttgtccgggggcaggaccacctccccctcgtcccagtccagctggcccgtgaggatgcgcagcagggtggtcttgccgcagccgttcttgcccagcagtcccacccgctcgccggagtccacctgaaaggtgagcccgtccagtatttttttgccgacctcaaattccttgaccaggccggaaatggcgatatcgatcataacggtcctctgtctctcctgtgttggcctctgggaagggcccttccgcaggcgggccttccaaacggtccgtccgcgggagggccctgggggtcactccgcctccggggtgatggagagcaggtaagcggtcagctcctccagctccatcccgcgggacgccttcactaaaatggtgctgcccggccggaccagctggtccaggacaggcttggcctccgccttgtctttgcagtggtacaccaggggcacgccggagttccgggccccctgggcgatgtgctccgccagctcccccaccgccaccaggcagtcgatgcgggccttgcccaggcactcccccacccccgtgtgcagggcgggggcgaagggccccagctcgaacatgtcccccagcacggcgatgctccactggctgcgccggtcggacagcacgctgatggccgcccgcatggactgggggttggcgttgtaggtgtcgtccaggatcacgatcccatccccccggtagaggatattcatccgcatccgggtggggacgaagcggaggatgccctccacgatctggtcctgggtgagcccgaaccgctctccgatggcggcggcgatgagggcggggtagatcatgtgctcccccagggcagggatctccacctgccggtccatccggggggtggtcatctggcagaggatgcggctgtccccgtccccctccagccggcgggcccggtactccaggccctcctcccggccgcagaagacggcgggcaccggggtgcggccccggagggatgccagcatgggatcatccccgttgagcaccaccagcccgccgggccggatgtggggcagcagctcgcacttggcccggaagatgttctcccggctgcccaggcgctcgatgtgggcgtccccgatgttggtgatgactcccacgtccggctggacgatctcccccaggtagtcgatctcccccgggcggtccatccccatctccagcacgcagatctcacagctcctgtccagccgcagcagggtcaggggcaggccgatgttgttgttgtaattgccctcggtcttgagcacccggtaccgggtgctcagcacggcggcgatcatgtccttggtggtggtcttgcccacgctgcccgtcacggcgatgaaggggatggggaatcgggccttgtaccatgcggccaggtcccgcagggcccgctgggtgctggccaccttgatatagaatctgtcggggcggtagctctcccgttcccgggcggtgaggcagcccagagcgcccccctccagggcggcgttgatgtaggcgtgcccgtcgaaccgctctcccaccagggggatgaacagggagccggagtggatggtccggctgtcggtgtccacccgctggacgatcacgttctcatcccggaagtcgcccagcagcgtgccgtggacggcctccagaagctgggccagagtgatggcttccatctggtcaggctcctccttttctggctttcagagacgcctccacgatggtctggcacagggcgccgtagccgatgcccaccgcggccgcctcctggggcaccagactggtgggggtcatgccgggcagggtgttgatctccaggaaatagggggtcccgtccggcgtcacgataaagtccgcccgggcgtacacggacagcccgatggtccgaaagacggccagcgccgcctcccccagccgctgctcccactccggggggatctgggccgggcagacctccagggccgcgccgggctggtacttgttctcgtagtcgtagaagccctccttggggatgatctcgatggagggcagggcccggtcctccagcaccgccacctggatctccctgccctggatatactcctccagcacggtgcggccccccagcttccggctctcttccagggcccggcgcagctcctgtccgtcccgggcgatgaagaccccgatggaggagccgctgtccaccggcttgaccaccacaggcaggcgggtctgccgggcaagctcctccaggttctcctccgtcacggtgacggagcgccaggccggggtggtgacctgacccgccaccaggcgcttggtcaggtccttatccatggcgatggcgctggccaggcagccggagccggtgtagggcactcccagcagatccagggccgcctggatgcggccgtcctcgccgcaggcgccgtgaagggccagatagaccacgtccgcgccggcgcacagctccagcaccccggggccgatggacgagggactcctgtcccggcgggcggcgcgcacctgggccaggtcgggggcctgccggccgatccgcttgaacgcttggggcaccggggcgtcgtagagggcctctgcctggccctccaccccctctgtcccgaaaaacaggtccaccagcgccacctgatggccctgctcccgcagggcctcgctcaccatagcgccggaggacagggagacgttgcgctccgggctgagcccgcccgccaataccacgatcttcatcctattcaacacctcatcaggtctgtcttataataatatgccagccaaatattttagcacatatccctggaatactcaatggccttttctcattttgcctccttccacgggaattttatcccttttcccccgcttttgcgctctgtcccgccctccttgccgttgaactcacccaaatcttatgatatgatggcccgtgtggtgacaaaaatagaggccggatctgcatcttttccgcagagccccgggaaattccctcagccgtcaccgcacgcgccaagaaagaacgctccgcccggcgggcggggcacccctttggaaagacgaggtgggacctgtgtccgatcaattctcccgttcccgcatgctcctgggcgacggcccccaggagcggctcttccacgcctctgtggccctcttcggggtgggcggcgtggggggcttctgcgctgaggccctggcccgggccggcatcggcgccctggatctgtacgacgacgacaccgtctccgagagcaacctgaaccggcagctcatcgccctccactccaccctgggccgccccaaggcggaggtgatggcggagcgggtccgggacatcaaccccgcctgccgggtgcgggccctgcggatgttctacctgccggaaaacgccggggaggtggacctgtcccggtacgactatgtggtggacgcggtggacaccgtctccgccaagctggagctggccgtccgctgccaggccctgggggtcccgctcatcagcgccatgggctcgggcaacaagctggacccctccgccttctccgtctccgacctgtccaaaacggagggctgccccctggcccgggtgatgcggaaggagctgcggaagcggggcatccaccacctgaaggtggtctggtcccgggaggagccccgcgcccccctggcccccccggaggcggagctcccccccggcggggacacccgccccgcctcctccccccgccgggccgtcccgggctcggtctcctttgtccccggcaccgccgggctggtgctggccggggcggtcatccgggatctggccggtctctgaccgcctcaaaaaagctgccccctgtataggaacagacctatacagggggcttttttcactctttttcagtcccgccgggctcagcccaggatcagggggccgatgaaggagtacgccaccacgaagacgcaggcaaaggcaacgctgatccagcaggcctggagggcctccttggtgttgctgcactgggcggtgcccagctggccggcaaagttggtggtgggataggcggagccggtgagccgggtggccgccaggatggagacggcgaagcagcccatgggcaggcccacctgggtggccagaccgccgaacatgtcggtgatgatctggatctccgccacggcggccgcctcgatgccgaagccgcccaccacagaggccaccagcatgacggcggtggggctgttgcccgccaggccgcccagcaggttggagagggcgtcaaagccgccgcccagggtgaccaggttgagcagcacgtcgatgctcacaaagatcaggaacatgttggcctgggaggccacgcccttggtgatgcagtccacggagcggtcaatctcgatgccgccgaagatggccaccacggcagccaggacgatcatgaccatcagggcgtagttggtgccctgcttggtggcgatgccgtagcccaccagaaggacaaaggagatcaggaaagcgaccgtggtccgcttctgacggggggtgatgaccacctgatccaggtgctgcacgtcctcccccagggcatagccctccttgccgaaggtgcgcttctgggcgcggttcgcgcccacccaggcgccagccagccagaacacggcgaaggggatggccgcctggatcatcagctcgccgtaggacaggccggtgacctccatggtgatgagggtcacgccggtgagggggcccaggatcaggccgatctcacccgccaccttgaacagggtggccaccacggtgggggtgacccccagggaggccatgatgggcagcatgatgggggcgatgacggcgttgccgccgcccagggtgcccagcaggccgcagacgatgatggacaccaccaccagggcgatcttgcctttggtctgggtgttcacgccgatgcgcttgacgatccagtagaccagggtgtgggtgacccccgcctcgctcatcagcacgcccaggccggcgcccatcatgatgatgaggccgatcagggccgtggaggagcccagcgaggtggcgaaagccttggccatggcccccaggtcctgccccagcagcagagcgcccaccagcacgcccaccatgatggcggacacgttgctctttccccggaagatcagcacgatcatgaccaccagggggatcagagccagcagagagggcgcctgaatgatagaccaactacctaattccatatctgtttctcccttctgtccgccccggtccagacaggcaggccgggacggctcacacatattgttttctccctgtcctcagacaggtcctccgctctcgcgccggatgaccgccccctttctccctccggcagacctgccctggcgcagggcgaattcgccccccaccagcacgtggcagatgccctccggcttccgcacggaatcggtgaactccgaggtgtcccggacccgctccgcgtcaaagactgtgatatcggcgatccggccctccgccagggtgccccggtccctcaggcccaggatgtccgccggcaggccggtcagcttgtacaccgcgtcctccagcggcatcagctggtgctcccgcaccagccgcaggaagcgggggaaggtgccgaagctgcgggggtgggggtcggtgatggtaatggagcggtcaaaggacaggccgtatccgtcgctgcccaccgcaatgtccatgtccttcatgatgttgagcatgtcgccctcatcgatggagaagtagatgcaggccacccggccgccgcagcagtccagggcgtggaccaccgtgtccgccggggacagcttcagctcctccgccagctccgccacggtcctgccctcccactccgggcggcagccgtgagtgccggcgatcatcacccggtccgctccgccgcggtcctccatctcggcggcgatctccgccttcagctgccgggaggggtcccgcagccgctccagcagggcggcgcggcctccgtcgtgggcccacttgggcaccagggcggtcatagaggtggaggtggcggtataggggtactggtcgcaggtgacgttcagcccctcccgccgggcggccgccagcttgtccagcagctcccgggagcgcccccactggggcctgcccatcagcttcaggtgggagatctgcaggtgcactccagagcggcgggtgatgtccagcatctcgtccactgcctggaagatgcggggcccctcgttgcgcatatggacggtgagcagggcgtcgtacttcttcagcaccttggccagctccaccagctcctcccgcttgcagaaggcgctggggggatagatcagccccagggacatgccgaaggcgcccgccctcagctcccgctccagcaggtccttcagccgctccatctcctccggttcagggtcccggtccacaaagcccatcaccgccccccgcagggtgccgtggcccaccagctggccgtagttggcggtgcagccgtgggccgccaccgcccgggcatactcctccaccccgtacaggccgtccaggctccggtccttctcgttgaggaccacctgactgaacatgctggtgtcatcaaaaaagtattggacgatctcccggctgttctccggcaggctgggcaggatggaggtgccgcagttgccggtgatctcggtggtgatgccctggaagagcttgctctccggctggaagctgagcagggggcacgcatcggagtggctgtggatgtcgatgaagcccggggccaccgtcagcccggacacgtccaccacctcccgtgcctcctcccccgcatccggggcgatgcgggcgatgcgcccgtcccggatgcatacgtcggcggcatagggccgggaacgcgttccgtccaccaccgtgccgccccgcaggatcagatcatacaaggctccttccctccttttttctccagaggcccgccgggggggacgtcagctcccccggccatctctccccggaaaggggagagatggccgccgcggcggtccctctatattggcaggtcagatcgggtcagcccttcttcagcaccgtgcccgttctggagccggtagccgcgccgtccttcagggcgaaggtgccccccaccagcacgtggcggatgcccgccggctttttcaccgagtcggtgtactccgacaggtcccgcacctgctccgggtcaaagaccgtgatgtcggcgatccggccctcctccagggtgccccggtccttcaggcccaggatgtccgccggcaggccggtgatcttgtacaccgcgtcctccaggggcatcagcctgtggtcccgggccagctccaggaagcgggggaaggtgccgaagctgcggggatgggggttggtccgggtgatggaccggtcataggagaagccgtatccgtcgctgcccagtgcgatgcgcatgtccctcatgatgttcagcatgtcgtcctcgttgatgcagaagtagatgcaggccaccgagccctcgcaggcggacagcacatgcatcactgtgtccaccggggacagccccagctcctccgccagctccgccacggtcctgccctcccactccgggtggtagccgtgggtgccggagaccatcacatgggccgggccgccccggtcctccatctccgccgccgtctcgtccttcagccgctggtcgggggccttgacccgggccaccagggcggacacgccgccgtcgtgggcccacttgggcagcagggcggtcatggaggtggaggtggcagtgtaggggtactggtcgcaggtgatggtcatcccctcctgccgggccgcctcgatcttgtccagcagctcctgggagcggccccactggggcttgcccatcagcttcaggtgagagatctgcaggtgcaccccggagcggcgggtgatgtcgatcatctcatccactgcctggaagatgcggggcccctcgttgcgcatgtggacggtgagcagggcgtcgtacttcttcagcactttggccagctccaccagctcctcgctcttgcagaaggcgctggggggatagatcagccccagggacataccgaaagcgcccgccttcagctcccgctccagcagatccttcagctgctccatctcctccggttcagggtcccggtccacaaagcccatcaccgccccccgcagggtaccgtggcccaccagctggccgtagttggcggcgcagccgtggtccgccaccatccgggcgtactcctccaggccggacactcccagctggggcaggctcccggcgggcagctccagctggctgaagaagtagcggccgatctcatcccggctctccggcgtgctgggcaggatggagatgccgcagttgccggtgatctcggtggtgatgccctggtgcagcttgctctccggctcatagtccaccagggggcaggcgtcagagtgagtgtggatgtcgatgaagccgggggccaccgccagtccggacacgtccaccacctcccgggcctcctcgccgccctccggggcgatgcgggcgatgcgcccctcccggatgcagatgtcagcggcatagggctgggaacgcttcccgtccaccaccgtgccgccccgcaggatcagatcatacatagggatacctccattctttctgctgtctcgcttgtctgttgggatgcaaaaggacgcacctgcccggcggggcgttccgtcccgctgcggttcagtgcgtcctgctactggatggcagaaaggacaagtccacttcccgccgcatagcaaaatgctgactattcacgcgcctgactggtgctgtccaggaacttcatccgggcggaccgggcggcggcgtacagcacccgcttggagtcccccagatagttgtccaaaaggctgttccggatctcctccaggtcgtccaccaggctgtgccccacaaagacggagcggaggaagcgccgggtcagctcgcagaccatattggtgtctgcgtccacgatcaggccggtggcccgttccaccaccaggatgaggatcaccttctcgtgggccaggtagatggggttggtcttctccgggcgggcgtcccccaccacgcagatatgctcccccgggttgaaatccaacataaaaaacatccctaagtttgttgctgttatcaaattaccacaaaagcggggccttgtcaaccgccccgctccaacatcccaggaaaatcactgtgtcagccacagctttttcgttgtggctgaggcgcggtttggatggaaagatgttcttgacagcgctcccgtccccccgcgggggaaaaacggtcctctcccccctctctcctccgccgcccggcgcggcaccgtgaccatcgctcttcctatcactataacagagataacaatgacattttctatttctctgactgttactgttacggggccctaattgcacggaaatgtgccactttctccccccttttccgttaggagtaaggagggatgcggattggagaacgcgaaacggggttttgttttctactttgacaactactttgtggtggaggacctccccccggaccagcgggggtggctgctgtccgccctgtgcgtctacgccgagcgggtgtggcgggacccgtcggtgaccatggaggagatcctggaccactacccccagatgtccggccagaccaggatcgcctgcggctttctgggggcggccgtcctgcgggacacccagcggtggctcagccagcggcaggcccgggccctgcgccgccagcagggggaccggccgggcaggcccccggctcccgcccgggagcgctcctggagccgggagcaggacatggagctgacccggaagctggccgcccgcctgcgggaggaggcggccatggcggaggcagggggagcagagggacaggactgacaggaccgcatgggcgcgcccatgcggtctgttatcccgggtggtgaaggtgaactggctgccgccggcgtgggtcctgtccctggcggccgcgatggcccgccggcaggtgcctgctcttccgacgccggtcctgtgatgccggagaacgcggagatccacttaaaaagagcatggccaacacacaaaaaaagagtgaaggatctccctccactcttttttctgaagatgcaagtaagcctgtaagccgggttctgtcttttaagacagccatctatctcgacgcaccgttgccggtgcgctccagccgcctccctgggacggtcgggccgacctgtgtgtccctccacggcgttgctccggatagagtttacagcgacggacagttcccagccgtcgggtgagctcttacctcacctttccacccttacctcaccggcgcaagtttcatatccctcgcttcccccaaaggaaagctcgctcattccaccgcgcctcctcccccgctcacaggggatcgaggcggtatatctctgttgcacttttcctagggtcgcccccggcgggtgttacccgttatccttgccctgcggagcccggactttcctcacaggcgggcctttcgccccgcccgcgcggctgtccagcttacttgcccgtctatgatacaggaaaaccggcggattgtcaaatccatctgcggatggcccgccgctcagtctcccagggcctcccgctgggccacgatgacgggcttgttgtagcaggagaaggcgtcctccaccagcaccgggtcgggcttgcgggtgaagaggctcaccaccggcacgatcaccagtccggccagcatgcagaaagcgccggcgttgatgggcgactggagcagagctggaaagcgggagcccacgaagatgttggacagcatcaccacagtggagaagagaaagctggcccagcaggcggcggaggtggccttcttccagtacaggccgtagaggaagggggccaggaaggcgcccgccagcgcgccccaggacacgcccatgagctgggcgatgaaggtgacgctggacctgtactggatgatggccagcaccacggagatagcgatgaaaaccacgatcaggccccggatgatgcggatctggcgcttctcatccatatctttgatgaagtggtccttcaggaagtccagggtgagggtggagctggaggccagcaccagggaggacagggtggacatggaggcggagagcaccaggatgaccaccacggcgatgagcacatcggacagtccggagagcatggtggggatgatggagtcatatccgttggccgccacgtcgatctggtcggagaagagccgcccgaagccgcccaggaagtagcagccgccggccaccagcagggcgaatacgcttgaaatgacggtgcccgtctcgatggccttctcgtcccggatggcgtagaacttctggaccatctggggcagaccccaggtgcccagcgaggtgagcagcaccacgcccagcaggttcagggggtcggggccgaagaaggaggcgaagacgccggggatgtcagagacggcggggtcgctcacctgggccagtccctccagggcggccataaagcctccctggctgttgaggacggcggcgatgacggcgcagatgcccacgatcatgatgatgccctggatgaagtcgttgatggcggtggccatgtagccgccggcgatgacatacaccccggtgaggaccgccatgacgatgacacacacggaatagtcgatgttaaaggccatgccgaacaggcgggacagtccgttgtacagcgaggcggtgtaggggatgaggaagatgaagatgatgactgaggcggcgatcttcagcttgtcgctgccgaagcgcttgccgaagaactccggcatggtggcggagctgaggtgctgggtcatgatgcgggtccggcggcccagcaccgcccaggccagcagcgagcccagcagggcgttgccgatgcccgcccaggtggccgcaatgccgtacttccatccaaactgtccagcgtagcccacgaagaccacggcggagaaataagaagtgccgtaggcgaaagcggtgagccaggggcccacagagcgcccgcccagcacaaatccgttcacatccgtggcgtggcggcggcagtacaggccgatgcccaccatcacgccgaagaacacgatcagcatacccagtttgacgatcatagcgatcacactcccaaaaactttctcgcgttaaactgtaacgcacaaaagcaataaagtcaagagttttttcagctgatcctcccacgcctccggggcggctggaagccgcccgaaaagccttcccccctgagggggggaaggtggcgcggcgtatgccgcaacggatgaggggtcttccctccctcgaccccatatcaatccttaggatctgttaaagaggttccgccctgtggggcgggtttctttctgagcgatcagaaagaaaccaaagaatcgccgggtgacgctcccggcgggaccacggctccacatccgttccgcctaggtcccgcagtccgctttcccccggacccccgatgcgggggacacgggccttgggtatggcgccggcgtccggcgcgggtgggggacgacacccgcttcccccgtttgtgctgccgccgttggtgggtccaatgggcgcgcagaccccacggtggtgtcgcgcctaccctggcagaatagggacagccggtgtaaaaccggcgggcgcatgatatgcgcccctacgcaaagaccgaagggaatcccgtatttcgtcaattcgcctgaaatctttctccccggcccccgatggggcagactgtttccatccaggggttgcaaaggacagggagaagtgatataataccatcgctttttaatgaactcagagaagggaacgagagatatgtccggacattccaagtggcacaatatccagaagaccaagggcgcggcggacgccaagcggtcccagatctttaccaagatcgcccgtgagatgatcgtggcggtcaagaccggcggcagcggcgaccccgccaacaactcccgcctggccaccgtcatcgccaaagccaaggccgccaacatgcccaacgacaacatcaagcgcaccatcgacaaggcgctgggctccggcaacaccgacgactttgagaacgtggtgtatgagggctacggccccaacggcgtggccgtcatcgtagaggccctcaccgacaaccgcaaccgcaccgcccccgaggtgcgccatctgctggacaagtacggcaagggcctgggcgccaccggctgtgtgtcctggtcctttgacaagaagggggtcatcgtgctggacgccgaggacctggacgaggacaccgtgatgatggacgccctggatgccggcgccgacgacatgcaggctgacgacgaggtgttcgaggtctacaccgatcccgacgctttcaacgccgtggtggccgccatggaggccaagggctacaccttcctggaggcgggcgtgcagatggtgccccagaactatgtgaagctcaccgatgaggaggacatcaagaacatgaccaagctcatcgagttcctggaggacaatgacgacgtgcagaacgtctaccacaactgggagcaggactgatccctccgtccctgccggcaaagagcgggaccgctttcgggcggtcccgctcttgttctgtccctgtgctcccggagcctgccgggccctcatctccatgcgggacgcggcctcgctcttcttccccgccctctcccccctcttccggggaaaacaccgagcggcagggctgacgccccgccgctccagtccagacgatccaactctccaaatgccctgctggccctccactcactccatgagccggaaaaattcctcctcgctgagcaccgggacgcccagctcctgggccttgcgcagcttggagccggcagcctcccccgccaccacataggtggtcttcttggacacggaggaggccgctttgcccccccggtcctcgatcatggccgccgcctcctcccgggtgaggcgctccagggcgccggtcagcacgaaggtcatccccgcaaagcgctggtcctcccccttctccgcggctgcggtattcacccctgcctcccgcagccgggccatcaggtgccggctctgggggctggccatccactccaggacgctccgggcggtgatctccccgatgtcgtccacggcggtgagctcctccagggtggcgttctccagggcctccagggtcccaaagcgggccgccaggaccttgcccgccttctgccccacctgccggatgccaaaggcgtagatcagccgggacaggtcctgctccttggagcgctggatggcggccatcaggttttccgccgacttcttgcccatccgctccagctgggccacgtcctcctccttcaggaagtacaggtcgccgggggtcttcaccagccccgcgttcaccaggttctccaccaccgcgatgcccaggccctcgatgtccatggcgtcccggctggcgaagtgggccagattgcgcagcagctgggcggggcactccgctccggtgcagcggatgtgggccccgtcctcctcccgctccaccggagcgccgcacaccgggcagacctgggggaagcggtagggctgggtgccttccggccgctcctccgccaccacggacagcacctccgggatgatctcccccgcctttcggaccagcaccgtgtccccgacgcggatgtccttctccgtgatgaagtcctggttgtggagggtggcgctggtcacggtggtccccgccagccgcaccggttccagcaccgctttgggggtgagcaccccggtgcggcccacctggaccgtgatgtccaccactctggagggcttcacctccggggggtacttgtaggccgccgcccagcgggggaatttggccgtgctgcccagcagctcacgttctgacaggtcatttacctttacgaccgctccatcgatatcgaagggaaagctgtcccgctcctccccgatccgtgcgatgcgggcaaccgcctcctccacctggtcacagctgtaatgcggaatcactttaaagctgtgtattttcaggtattccagggtttccagatgggtgctgaaggtctccccctccacccactggacgttgaacaccaggatgtccaggcggcggcgggctgccaccttggggtccagctgccgcagggagccggcggcggcgttgcgggggttggcgaagaggggctccccccgccgctcccgctcctcattgagggcgtggaacaccttcttgggcatgaacacctccccccgcacgatcagcctggcgggggcgtcagggatgaccatggggatagaccggacggtgcgcaggttctcggtgacgtcctcccccacccggccgtccccccgggtggccccccggacgaagaccccgtcctcatactccagcgccaccgagaggccgtccacctttggctccaccacatagcgggcgtccggcgccgcgccccgcacccgctggtcaaactggcgcagctcctcaaagtcgaatacgtcctggagggactccaggggcacccgatggaccacctgctggaaggcgtccagggccttcccccccacccgctgggtgggggagtcgggggtgatccactccgggtgggctccctccagctcttccagccggcgcagcttgtggtcgtagtcgtagtccgtcatggtgggggcgtcctggacataatactcatagttggcctgcaccagctcccggcgcaggcactccagctcctgtttttcatccatgaaaggcatctctcctctgtatcacgcggccccgttcagggtcagatatgtgtcgggcaccgccccaacaatgacggtctccgccacccgcaggccggtctctatggtcagctccgtctgcccgccgggcaggatcagcgtcacggggacggccacctccagctcgatgcggtgcagggtctggttcacccccgcctgggagaagtcgctgcggaattccgccgacaccgtccccacccgcagggcccgcacccgcagctccgggccccgggcccacaccagttcgctgtccaccaggctgcccagggggatgcggatctcggaagcgtccaccccctccagtgcggagaggatctgggccaccagctgagcccgcagctggttcagggccgccatatcggtggtcatggcggtgatggccccggaggcgtcccgctggatggtgacgaagtccccgtagtccacgtcccgctccgccaggtcggcggcgatggcccggtcgatgacggcggtgagggcgttggctgcctgggcccgggccgccgcctccaccagggggcgcagctgatgctggagcccccccacgatcccggcggccagggccagggccaccagggcggtgagtagccacccccgcccccgtcctccccccggtccccgccggggcgcccgtccccggaggggcgggtccagccgccagcggacggcccgcaggcggcatcgcatatccatatcctcaccccctatgggtcaggatattcatcagggcgcttggcctatgtcaatctttcccgcccagcagctcctgcaccgccagcagcacgcccagccggcccgactcgaaggtgaggccgccctggagatagacggtgtagggggggcgcatgggggcgtcggcggacagctcgatggaggccccctggacgaaggcccccgcggccatgatgacctggcagtcgtagcccggcatgtcccagggctccggcgtcacataggagtccaccggcgcgccgaactggatgcccttgcagaactttttcagcgcctccggctcccgcatatggatcatctggatgatgtcgtggcggacggcggaggaggcgggctcggtctcatagcccagcagctccatcacgccggcggcgaaggcggcggtcttcaccgcctgggccaccgtgtggggggccaggaagagcccctggtagagcaggcggttctgccccagggtgcagccgcactccccgccgatgcccggtgcggtcagccgcatggccgccccctccaccaggtcccggcggccggcgatatatccccccgtgggggccagtccgccgccggggttcttgatgagggagcccaccaccaggtccgcccccacatgggtgggctcttgggtctccacgaactccccgtagcagttgtccaccaggacggcggtgcccgggttgacctcctttacgatgcggcacatctccccgatctccgccaccgacagggaggcacgggtggagtaccccttggatcgctggatcagcaccgccttcacccgggggtccgccgccgcccgggccagcccctccaggtccgggcagtcatccttcagctctacctgccggtattccaccccgtagtcccgcagggagccgtggcccttgtccgccgtgccgatggcccccatcagggtgtcatagggggcccccaccgcggacaggagcacatcccccgccttcagcgccccgaagagggcgcaggtgatggcgtgagtgccgttgacgaactggatgcgcaccagggccgcctcggtgccgaacaggtcggcgtagatctggtccagctggtcccggcccaggtcgtcatacccgtacccggttgtgccggcaaagtacccctctgccacccggtgcttctggaacgcggacagcacccgggcggtgttctcctcggcaatggcgtcgatgcgtgcaaactgctccgccaggccctgccgggccttctcccccaggtccaggacccgctggcttatctgtaatgtcatattccttgctcattcctatctttctttggtttcatacgggctctccccgcccagccgcccccctcagggctgctccagcggccgctgggccagggcggctgccagccggacgcaggcatccgcgtcggacaggctggcggtctccgccggggtgtggatataccggcagggcactgagatgcccccggtgatgacgccggtgcgggtcaggtggatggcccccgcgtcggtgccccccgcccgcatgatgtcccgctggacggggatgtctccctcccgggcggtgtcctccagcagcgccaccatggcggggtggcagatgacggaggagtccatcaccttcaccgccgcgccccggcccagccgggccgtgcccgcgcgctccgagccgggcgtgtcgtccacatcggtcacgtccaccgccacggcgtagtccggggcgatggaccaggcggcggtccgtgccccccgcagccccacctcctcctgggcggtgaacaccaggtagaggtcgttggggcactccccgatccgctccagggcggagagcagcaccgcacaggagatccggtcatccagataaggggagaccaccaggtcccctgtgcggaaagcgggggtgtcatagaccgcactgtcccccacctggaccagctgtttcgccgccgcctcgtccccggcgccgatgtccaggaagcactcgtccagcttcagcttgccgaagtcggccttctcctccggggcaaagaccccccgcaggccgcttttgaagcggacgggggtgtaggccgcctctttggggctgacgcctcccagccgccccacccggaggaagccctccttctcgatgtgggtgacgacgaagccgatggagtccatgtgggcggcgaggagcagcttgggccccttcccccgcctgtggacgatcaggctgcccatggtgtctgcggtgatctcgtcggcatagggctccgccagggcccggatgacctcccggatctccccctcgtcccccgaggggccgtgggcccggttcaaggtctggatcaattcaaacagttccatagttcactcctattttcatgcactctcatattctttgggcggaggctgggccccctcaccccagcaggccgggcacctccggcaccggcagggggccgaacagcgccgccgcggtcaggcaggcggccaccaggcccgcttcctctctcacagccgggcggcctggtcggccacgaacagccgggtcagtgcgagcatgtcctcaaaatccgccaggctgcccacgctggccggggcgtggagatagcgcacagcggcggagagggcggccacccgcaccccggcccgggagcgctggatggtccgggcgtcgttgcccccggcgatatactccttggtctgccaggggatgccgttgtcctccgccagccggcgcaggtcctcaaagagcccgcggtcgtagatggtccccccgtccatataggagatcacagggcccctgccgggggcgcacaccctgcggtgtccctccaccccgggcaggtcagcggcggtggtggtctccagcaccagggcggtctccggagccacagagaaggcggccccaaaggctccccgggtgcccacctcctcctgggcagtaaagacgaagaccacatccatgggcaggtcctcctccagcagcttgagcagcacggcacagcccacccggtcgtcgatggccttggccttgaacaggccctccccgaactcctccggcgtgcagacgaaggagccgtaggtccccggctccaccctggagagggcctcctcccggtccctcgccccgatgtccaggtagaaggcgtcggtcttggggaccttcttctcctcgtcccggctgaccaggtggatggccttgatccccaccacgccgggcacccggtccgggcccaggaccaccggcttgccgatggccacccggcggtccacgccgcccacgaagtcgaatttcagaaagccctcttcggtgacgtgggtgacgatgagccccacctcatccatgtgggcgcacagcatcagccggtccccggccgctctggcccccttcttccacacgatcaggttgcccagggggtccaccttcatagaccgggcccagggcctggcccgttccgccaggaactcccgcacctggtcctcgtcccccgacacgccgttcagggcgcacagggtcttcagcagctccttcatcgggactccgcctcctctccgatcccctccacaaaggcggccagcagccgggccaggtcctccaggtcccggcggctgatgacctcgatgggggtgtgcatataccgcaggggcagggagagcaccgccgtggccaccccctcccggctcacctggaggggccagccgttggtgccggagtggcccgccattacctcggtctggaccgccatccccagctcctccgccttgcggcgcatccgctgttccatccagcgggtgcagttggggcccacgccgatgacgggccccttgcccagagggaaggtcttttccttgggggcatccgggctgtccccgtgggtcacgtccaccgccgcgcacaggtctgggaccaccccataggccgcggtcaccgccccggtgctgtccacctcctcgcacacgctgcccagcacgtacaggtccacatccagcctccggtccttcagcagctccagggcccccagcagggcggcgaagcaggcgcggtcatccagggacttgccgcagatcagctcctgccccagaggaaagcagcccccgcggaagaccgccggggtgcccaccggcacccggcgctccgcctcctcctggctcagccccacatccaggcagagctcccggatggggatggacttgtccatgtcctcccgggtctggacatgggggggcagacaggccaccaccccagccagggggggatcggtgaggacggtgagctcccggtcggggagcatcctggggtccactccgcccaggggggcaaatttcagatacccttcttcatggccggtgaccacaaagccgatctcgt

SEQ ID NO: 13558 - DNA, 14913 bp, Unknown
  gut microbiota DNA sequence
cagccgcttcgccccctccctgccgcaccggcgcagggccagcacgctgcccatccggtccacggtcacctcgtccgccagagggcggagcagctccgccgccgcccgggacgccggcccctcgaatccgctgggggcgcccaggccgcacaggcgggaaagtatcgcatcatgatccaactcagtgttcctcctttgtgcttccggtcacagggaccggaccagctccttgaacgcccggccccgctccatgaagttcttgaagcggtcgaaggccgcgcaggcgggggacagcaccaccacgtcccccggccccgccgcccggcgggcggcctccaccgccccggccaggtcctcggtctggatgatctccgggcagccgcggccgccctccgcctcctccactgcctgccggatggcccgggccgtgtccccggtgaggaccagggtcttgacccgctcccggatctccagggccagggcgtggaaggggatgcccttgtcatagcccccggcgatgaggatcaccggctccgggaaggactccaggcaggccacggtgcggctgggactggtgccgatggagtcattgtagtacttcactccgtccagctcccgcaccagctcgatgcggtgctccaccccctggaagcgggcggccaccgcccggacgcacttgtccggcaccagtccgtccacggcggcgatggccgccatgtagttttcgatgttgtgcaccccgggcagccggatgtcccgggtgggcagcacctcccggctgccctgggcgttggtgagccagatggccccgtcccggaggtagaccccctcctccagccgctcccggcggctgaagaaggtgaccgcccccccggccttctccgccaggtcccgggtcagctggttgtcatagttgaagatggcccggtccccctccccctggtggaggaagatgttctccttggcggcgatatactcccccatggatctgtggtagtccaggtggttgggggacagattggtcattacggcgatgtgggggctctgctccatggtcatcagctggaaggaggacagctccagcaccgcaaagtcctccggctccatgccggacacatcgggcagcaggggcttgccgatattgccccccacatagacgttgtatcccgcctctttcaggaactccgcaaggatggtggtggtggtggtcttgccgtcgctgcccgtcacaccgatcaggcggcaggggcacaggcggaagaacagctccatctccgaggtgacctccgccccccgggcccgggccgcctccagggcggggtggccggggtgcaggccgggggtgcggaagatcacgtcctgatccagcccctccagatacgcctcccccagccgcagccgggctcccaggctctccagctcctccgcctgctcctccacccgctcccgctgggccctgtcgcacacggtcacgtccagatccgcccgcagcagcatccggatcagcggcgtgttgctgacccccatgccgatcacggcgatcctcttcccccgcagactgtcgaaatattccctgatgtcggacatgggatacgctcctttcccgatttgggccgccgcggcctgaggccgcggaaaaaatttgactggttttatgggttttatggtatgttatcacagaagaagaaaaatttcaatgaaacactccgccggaatttcaacgggattcttgcactttttccattcctgtgctattcttgttaagataggggtcttcttcccttcccgatctgaaatcacgacagaaacgaggtcttttccatggagcaagccaactccgccccccgcaagcgcatcttcagcggcatccagcccagcggcgatctgaccctgggctcttatatgggagccatcaagaactgggtcccccttcaggatgagtacgactgcatctactgcatcgtggacatgcacgccatcaccgtccgccaggacccggccctgctgcgccggcgcaccctggagcagctggcccagtatatcgcctgcggcctggacccggtccggagcgtcatcttcatccagagccacgtgccccagcacgccgagctggcctgggtgctgggctgctacacccagtttggggagctgtcccgcatgacccagttcaaggacaagtccaaaaagcacgccgacaacatcaccgccggcctgttcacctacccggtgctgatggcggcggacatcctgctctaccaggccgacctggtcccggtgggtcaggaccagaagcagcacgtggagctgtgccgggacgtggcccagcgcttcaacggcgtgtacagcgacaccttcaccctccccgagcccttcatccccaagatgggcgcccgggtgatgagcctgggggacccctccagcaagatgagcaagtccgatccggacggctgcgtcttcctcatggacgcccccgaggtcatccagaagaagttcaagcgggcagtcaccgacagcgagacccaggtccgcttcgacccggagcacaagccgggcatctccaacctgctgaccatctactgcgccgccaccggcaagagtccggaggaggcggaggaggccttccagggccagggctacggcgtgttcaagcccgcggtgggcgacgcggtggtggagctcctccggcccatccgggaggaggccggccgcctcatggccgacaaggcgtatctggagggcatctacaaggagggtgcggagcgcgcctcccaccttgccgccaagactctgcggaaggtctataaaaaggtgggctttgtggcccgctgaccgggcgcccgctcccgcctccttccccacatcaattctgcaaaaggggttttcccatgaacgttcccacggatatttcccttcaggtggtgggctctgtggccgccgccctgctggtggccgcggtggtggctctgatcgccaccccggtggtccgctccctggccttcaagatcggcgcggtggatgtcccccgggacagccgccggatgcatgaccaccccatccccaggatgggggggctggccatcttcttcggcttcatcctcagcgtgctgctcttcctgcccctcaccacccagctgcggggcatgctgctgggcgcggtggtcatcgtcattctgggcatttttgacgacatctatgccctgtccgccaagctgaagttcgccgtccagatcggcgcggccctcatcgccgtgctgatgggcaaccagatcgactacctctccaaccccaacatcttcagcagcgacccctactggcacctgggcgtgctgtccatccccatctctgtgctgtggatcgtggccatcaccaacgccgtcaacctgatcgacgggctggacggcctggcctgcggcgtgtccaccatcagctccatgaccatgctggtcatcgccctgacggtggccgaggcccaggtggccatcctcatggccgccctggccggcgcctgcatcggctttctcccctataacctgaacccggccaagatcttcatgggggacaccggctccaccttcctgggcttcgtgctggccaccgtctccatccaggggctgttcaagtcctacgccatcatctccttcgccgtccccttcctggtgctgggcctgcccatcttcgacacctgcttcgccatcctgcggcggctggcccgggggcagagccccatggcccccgaccggggacacatccaccaccggctcatcgacatgggcttcacccagaagcaggcggtggcggtgctctatctcatcagcgccatcctgggcctgtccgcagtggtgctcaccaccaacaacgccatgaaggccatgctcttcctgctggccctgtgcatggcgggcgccttcgggggcaggctctacctgtcccacagcgacagcggcggctccggcgccgcgggggaggccaagggccggcagcaccgccccccctccaagacccagatcgccggcaacgacaatttcttcggtgaggaggaccgttccgacaaatgaaccgtatccgagtcatgaccatcttcggcacccggccggaggccatcaagatggcccccctggccctggagctctcccgccgcccccagatcgacgccttgtgctgtgtcaccgcccagcaccggcagatgctggactccgtgctggacatcttccgcctggtgcccgacttcgacctgaacatcatggagccccggcagaccttgtccaccatcacctccaagtgcctgctgggcatggaggaggtgctggagcaggcccgacccgacctggtcctggtccacggtgacacctccaccaccttcgccggcgccctggccgccttctaccaccgggtgcccgtgggccacgtggaggccggcctgcgcacctatgacaaatactccccctacccggaggagatgaaccgccggatggtcagcgccatcgctgacctgcacttctgccccaccccctccaaccgggacaatctggcccgggaagggatcgagcagggcgtctttctgaccggcaacacggtgatcgacgcgctccagaccacagttgtaaaagactttcatttttcagaaggcgtcctcaatgatttggattatgtcaaccgaaaggtgatcctggtcacctgccaccggcgggagaactacggaacgcctatggcccacatcatgaccgccctgcgccgggtggccgacgccttccccgacgtggagctggtctatccggtccacctctccccggtggtccaggaggcggcccatcagtacctggacggccacccccgcatccacctcatcgccccactggcggtggacgagatgcacaacctgatggcccgctgccatctggtgatgaccgactccggcgggctccaggaggaggcccccgccctgggcaagccggtgctcgtcctgcgtcgggagacggagcgccccgaggcggtggccgcggggacggtccagctggcgggcaccgaggaggagcccatcttccagatggcctcccgcctgctcaccgatccggcggcctatgccgccatggcccacgccgccaacccctacggcgacggccgggcctgcgggcgcatcgctgacgccatcgagtaccgcttcggtctgcgggcgcagccccccgcccccttccatccctgacctctgtctgaccccacgagaaaggagccggccatggaccaaaaaaaccgcctgatcatcgccatcgccgtcacccttctcatcgtggcggccatgttcaccagcttcggccgcagcctcttctctatgcgcaccgaacatatccagctccctgagcccggcgcctcctccagcagccaggaggggggaggctcctctcagtccgccgagctgttccagcgggtggaggtgaccccccagaccgtccagagcgtcatccgcaccctggagcgctccaccagctattactgggagctgacggtagagaccttctggaccgggggctccagtgccacctccgtccagacctgggtggacggaggctggtcccatacccgtcaggtcctcccctccggtctgatccgccacgacctcatcagcgaggacaccgtctactactggtatgaggggtcctccgactacctcaccgccccggcggagggcggctccgccgatctggcccagcacatccccacctatgagaccgtgctggacgcggacccggagcagatcaccggcaccggctacgacgactccagggggggcatcccctgcatctatgtggaggtatccgcccccggcggggagcgggtggaccgctactggatcagcgtggagagcgggctgctcatctcctctgagactctggagggggaggagctgctctaccgcatgaccgcctattctcccatccagtcctgcccctccggcaccacctttcagctgccggacggaacggtgctccacagcatttgaggaggagctcaccccccttgcttctcctccttcctgtcatccgccagccccagcaggagcagcagccccagggtgatgaccaggtccatgttgtccccctccaccagcaggagcaggatgatcaggatcagcaggatatccccgctgtccagctcctccagccggaggactttcaggatgccgttgatcccccccttgtccccgccgaacagggcgttcagcgggctcttctcccctgagagcaggtcccccaggccgccaaagcccatgggacccggggcaggccggcggcctcctcctccgggcgcgccccgggctgccccgggtggaggtcctgcggagccccggggcccgttctccccccgctccggcccgggcggatggggcgccggacgccgggccccctcctctgggccgtcctgctccaccacccgggtataagtaccattctgggggatatagcggttatacatcgccccgccccccttctcccatgccgcggaagaggacccggatcacccgggccagccgggagatctgcaccgcccggtccagcttggccaggcggctctccttcaggaaggggcgcagggcgttgagcagggccaccgttcggtcgtcctccccctgatactcccgcagcagccgcatccccatctggatcatgccggggtcgatctcccccagggcggccagcgggtcctctccccccgccagggccggcggagcgctccccgccgaagcgggcgcctccgcctccctggcgccggtctgctccgccccctgggcggcctcccccgccggggaggcctgcggccggggagcgccgccgcccagggactgggccagcgccatgatctgccccatggcggacgggtcattgaggatcgcgttcagcttgtcttccatctcccccacagggcagcccctcctttccccctcctgtgcggggactcagtcggtcaggcccgactgcctggcctggcggctgatgcgctccaccagctcgcctccctccggggtgttcatcagccgctgcatcattcccaccagctggctggtgtcccctttcacggcggcctccgccgccccctggataccgcccccctgccgcagcagctccatcagccgctgggcatcgccggatctggccagacggttgagggcctccttatttttgaccagatcggcgggcaggctctcctgcccctttttgccgcttctttcctgattcataccggatctcccttccaagaggatttcattccagtatatgcgccagacgaggtaaggtgactcttttgaaaattcttgtgttttccgactcccaccgctacaccggcggcatgatccaggccatcgaggagcagcagcccgacctggtggtccacctgggcgacctccagcgggacgccgaggagctggccctcctctatcccaagctgtccatggtcaccgtgcccggcaactgcgacggctggaccacagatcctctggagcgccagttcatggtgtgcggcaagcgcgtcctcctctcccacgggcacatctggcatgtgaagcaggggtatgacgccgccctccgggcggcccggaacgccggggcccaccttctgctcttcggccacacccaccgcccctgctgcttccaggaaccggacggcctctgggtcctcaatccaggcagcgcccgcagcaccttcggcctcgtcctcccagagggggaggctctctcctgttccctgctggacatgccctgatgggcgcctctgtacaaaaaacacccccgggacccgttcacggtcccgggggtgttttttatatgtctcagccctgggcagcggcctcctcaatggccgcctcctccgcccgcatggctgccagagtgcggtccagcagctggtccagctcccagcccagcagctccgccccctgggcgatcacgtcccgggagcagcctgcggcgaatttcttgtccttgaatttcttcttcagggacttgagctccatgtcggacacgcttttggaggggcgcatcagggcggccgccccgatcagcccggtgagctcgtccaccgcgaagaggaccttctccatctcctgctccggcttgatgtccacacagtggccccagccgtggctggcggtggcccggacgatctcctcctccaccccggcctgccgcatcagctcctgggactttttgcagtgctcctccggccagcgctcaaaatccaggtcgtggagcagacccacgatcccccagaactcctcccggtccccatagcccagctcccgggcgaaccagcgcatcacgtgctccactgtaacggcgtggcgcaggtggaactcctcctggttatactgggtcagcaggtcccaggcctgctctcttgtcatggacatctctgaaacactccttttttcacttctgaactccttctgtgctcctggggacgaagctcccccggccctcccccgccggggacgggcatacagacggagcggggcttttgactgttttaataggccacgaccacgccgccgtcgttggcgtagacggtggtgatcccgccggcctccaggatcaggacctgctggaactggcatttggcctcgatctgctccttcagggcgaaagcccgctccaggcagttgcagtggcacaccgccgccacccgcccctgatgatccgggtccgccgccatccggtccaccagcttgcccagagcctgcttcatggtcagggcctggcccagcttgcagatctccccctgaggggtggcccccatcagcagcttgatccgcagcgccccggtgaccaccgcctgcagcttggtcagccgtccgttcttccgcagattctccagggactccagcacgaaaagggtctgcatctggcagatatactgctccacttcccggaccaccttcttgaagggcatcccggaggacgccagctcccggatcttcagcgccgtcagcacctctccagaggaggcggagcaggagttgaacacgtggacgttgcgctccggttcctcctcttccagcaggacccgggcctggaccgcgctgttgtgggagccgctgagcagggcggacagggtgaccacatagatgtcatccgcgccgcactggtaggcgtccagatagctctggggggcggggcaggcggtggagggggcgtcctcgctctgcttcatggcccacagcaggtcgctccggtccagggaggcgtcgtccacgaaggagctgttctccacccggatggtcagaggcaccttcacaaagcaggggtccttcaacatggtcccggtcaggtcgcagcagctgtccacaatgatcttgaaactcatacttttcatccccgaacatgatattagatattagatttacgatactataccacagttccgcccaaatgtaaagtaaaaccgcggcgcctcccgtgtgcaggatcgccccggagggcgcagtcccccgccgcttaccgaggcggacctctgtaaccgcccaaaccctcccctttagggagaaatgctgcggcgtgggctgtccccctctcggccccgcccccccaaagccttcccccctccggggggaaggtgtcacggcgtgcgccgtgacggatgaggggtcttcctttccccgtcccgctttttcgagaagggcggggcaagccccgcccctacggagtgactggaaacagcccgtacctcatagggcccgataccccatcgggccgcgcccacaaagacggcgggcgcacaatgtgcgcccctacgaattggccgaaggcatcccgtaggggcggcttccagccgcccgaaaagccttcccccctccagggggaaggtgtcacggcgcacgccgcgacggatgaggggtcttcctttccccgtcccgctttttcgagaagggcaggacaagctccgcccctacatgggccggaagggatcagcgcctccacagaaaaccggggcctggggcagtgtactgctccagatccccccgcggcccgggtcagtcctctgggaacagctccggctcctcggcgcgcagctccttcaggatcttctgggccgccttggaggacagatccagccgctcatagaggtcggggcggcggcggcgggtacgcaggatggactgcttccgccgccactggtccaccttggcgtggttgcctgacaggaggatggggggcaccgctctctcgtgccacacctccggccgggaatactggggcgcctccagtgcaccgttccagtggctctcgttctcatagcactccgggtcggacagcaccccgggcaccagccggcacaccgcgtccgccaccgccatggccgggatctccccgccggtgagcacaaagtcccccagggagatctcctcgtccacgcactcctccacgaaccgctcgtcgatcccctcgtagtgcccgcagaccaggatcagccgctggtagctgtccttcagccgccgggcatccccctggcggaaggtcctgcctgcgggagataagtaaatggtatggacccgctcccccgcctcctcacagatgtgcttccagcactggtagagggggtcggcctgcatcaccgccccccggccgccgccgtaggggtagtcgtctacctgccgctgcttattcaatgtgtagtcccggatctggtggcactcgatgcggatgtagccccgctcctgcccccggcccaggatggattcgcacagcatgtcccccaccacgtcggggaacagggtcatgatatcgatacggtacatagtcagtctctttcctcacttggcgttttatccccttgattatacgcaatctccccctgtttttcaatggatgccggcctttttccccaactctttttcccgccccggaaaaagggcccgcaccgggcctccgcacttggggcccggcgcgggctgcgctccggtcttactgctgtcctgtgggcttctgattggagaacttggtgtaagcctggctgatcttgtccgcctgggcctgctcgggctggtaccagcccttggactgggccagctggaacagctcggtctgggtgtggtgcccctggttgaacaggccgaggaaggcgtcccgcagggggatgttgacgcactccgaggcgtaggtgtcatagttggaggtcatcttcttctcactgcacagaaaatctgtcatacgttcctgatcgttcattcgttctcctcctcagcgcagctgatccagcagggtgttgtagttctgaaggtgttggctggcgcagttctggaacatggtcttcagctcctggtcggtgctctcctggaccgcggccagatacttgcagtggagcacccgctcaaagtccagctggtcattgagggcctggagctccttggtggtcaaaatgggcatacgaattcctccttcagccgtcatcggctctgatctacggccttaggtttcccgcctttttccaaattatacggcattttaggggtcccctgccgatcaaacagaaagatcacatattcccttccccggatctggcccaccgtcccgaagcagaagagggggaccagcgggaactgcccgccgccgcggaaggaggcggccagccgcacctcctccccgccccgctgcaccagcaggggcccccagctccgggccgcctgcaccagcactgggtcggacaccagcttccagggctcctcctcccagtaccactccccggcgctctcctctgtaaaaggataggccatcacagccttccctcccgccaccggccagcagcccgcatcctccagagtacggcggctcagggtccggctcagcaccagctctcccccccccggcaccagcgttcccagcagcagccgtccctttccgccgccccgcagccacaccttgtagagcccctggccgtcgttctggcggcgcgcctcggtgtgcaccctggggccgtcctcccgcagggagagggtcccgcctccctccagcatgatcttttccaccacggcctgtccctccctctccccgtctcgctccactttatgcaccccgggggcgtggatatgccgctgtgggaaaggcgccggccgcatgcccgcggccggcgcctttcatcccgcctgctcctgaagggtgagggcgatctcctcccgttcctccccataacagatctccatgctgtactgctgacggaaggggagcaggagcccctcggtatagctcccgtccggcgtgttggccagccggcaccagacctctccgcccgccgcatacccagacagataaagagtcccgccgtcagagacggagtagcggaactgctctgcttccgttccgttatgggtcaccagcagctccgtcagatagatctgctccgcctcctccagcgccatggcctcctccgtcgccttcagagccagagcgttgtactcctcactgcgctccgggaaatccgccccgctctgagccatggtctctgctgaggcccactttccctgtgtgagcacggaccgttccgcctcgctggcctgtctaacgttcaggaccacagaaaaatgcggacctgctccggcataggaatagggtgcccgccccaggtcctcctggcttgggacatagccctccacgggataggtgcccgtaaaatcctcataggatattgggctcccgagctgcctcccgcatcctgtcccgacgacgcacagcaggagcgccatcatccacgcaccgatccgtctcatccctttcccgcctccttgtcccctcaattgtaccacaagccgaatcaatatcccatttatgtttttcccgctccattaagattttttaatttgtccccgcctttttcaggtctgtctcatttttctcttgacaaagccggcctcctccgctaaaataacattcaacaaatgcagtgacgggaaaaaagacagggtcagcccccttcagagagccggtggttggtgggaaccggcgtgcggccccctgtggatactggtccccgagcagcttgtccgaatctgtgagtaggatgagacgtatggccccgttaccggcctcagccttgttcgaggcttatgagggccgctttcgggtaaccggcggccgaaccagggtggtaccgcgtcatttccgacgcccctgacttgaaaaagtcgggggcgtcgtttttgtcccccgcagaatgtaaaggaggcaccccatatgaaacccggatatcaaaagtacatccccttccagccccagcccatccagggccgcacctggccggaccgcgtcatcacccaggcccccgtctggtgttctgtggacctgcgggacggcaaccaggctctggtggaccccatgaacctggaggagaagctggaatattttcacaccctggtggacatcggcgtcaaggagatcgagatcggctttccctccgccagtgagaccgagtatgagatctgccgcgagctgatcgaggggggccacatccctgacgatgtgaccatccaggtgctggtccaggcccgggagcacctgatccgcaagaccttcgaggccatccagggcgccaaaaacgtcatcctccacttctacaactccacctccaccctccagcgcaaggtggtcttccacatggacaccgatgagatcaccaagatcgccaccgatgccgccgacctgatctacgagatgtcccagcccctgatccagtcgggtatgaacctccggttcgagtactcccccgagtccttcatgggcacggagatggactatgccgtggaggtctgccaggcggtgctggagcacctccacgccgccccggagcgtaaggtcatcctcaacctgcccaccacggtggagaactgcatgcccaaccagtttgccgacatgctggagtatttcatccgcaggctcccctcccgggactgcgccatcatctccctccacccccataatgaccggggcaccggcgtagccaccaccgagatgggactgctggccggggcggagcgggtggaggccaccctcttcggcaacggtgagcgcaccggcaacgtggatatgatcaccctggctctgaatatgtacacccagggcgtggaccccaggctggacttttccaatatcaacaagatccgggagatgtacgagcgctgcaccaagatgaaggtgggcgagcggcagccctatgccggcgagctggtcttcaccgccttctccggcagccaccaggacgccatcaacaagggcacccagtatatgaaggagtccaactccgacttctgggagatcccctacctgcccatcgaccccgccgacgtgggccggcagtatgaacccatcatccgcatcaacagccagtcgggcaagggcggttccgcctatgtgatggagcacaacttcggcttcgacctgcccaagctgatgcaccccgagttcggcgccgtcgtccagaaggagaccgaccgggtgggcaccgagatcgcccccgagcgcatctacgagctgttcaaggaggagtacctgaacattgacaccccctaccggatgctcaagcacgcctttaccgagagcatcgacgccgaggggcactcccatgtcaccttctggggcaccatccagcacacggacacgatcttccaggtctccggcgagggcaatggccccatcgacgccttcttcaacgccatcaaggacgagaagatgtcccacttcaccttcctggattacaagtcccacgccatcaccgacggctccgactcccagggcgtggcctacatcctgctccaggaccagcgggacggcaggaagtactggggcgtgggcgtctcccataacattaacctggcccccctgcgcggcatcctctctgccatcaaccgctccaagcggagcgctcagtagcctgagc

SEQ ID NO: 13559 - DNA, 160 bp, Unknown
  gut microbiota DNA sequence
tgatgatgaccgccatctcggcgcgggtgactacgttctcggggccgaaggacccgtcctcgtagccgtcaaagaggccgatggcagaggtgaccgccacggcgtccttgttgacgatctcagcgttgtcgctgaagtcgtcaaggcccttagcgctgga

SEQ ID NO: 13560 - DNA, 28524 bp, Unknown
  gut microbiota DNA sequence
cctgtcctgactgggcccggcagatccggacccgctcaaaaccggagggaaaagctgttttgtgagacatttcaatacaaattatggaagtgaagcggaactgtgcccatttctgccccgcctgtgcggaagccccggtattgagagaggcggcccgatggcggcagcggtgtgagacgctggtcagtgcgaaaaccttgccttgccgtgccggtcaggtccaggagagctccgctcggtgactcccgtaccgggggtctgggaaagacggaagaacaccccatcatctgtcatggcttcgccataaaaccttccccctaaggggaaggttttgggcatgtgccgggatacccgcttctaaagggaagggccctccgggcgtccctgggacccgtccccgcaagatacgccccgtttgaacaagatgcataaaaaatagttaaactttaagtatgcgccaatatagcttataattattcatagaatatgcacacatttaagggaaaactgtcgaaaataatcgtatgacttgactctttccttttatattgcaccccactataattttccatatcgtatatttaaaagggggtaaaaccttatgaacttctcagagctggattttgaggcactggaggacatcccgccgctgcgccggcattatgatgtcccccggatctccattacagaaaagggaatggtctcgatgaacggagccttgaaaagaggggtgggtgcacagagagaatttcgtgcaaagactagcccagacggccgctacttgctcctgtgctccgaggagacgcccaacatctgtttttccgccaaaggaggaaatgtgctccatcttgacttcaaacagtacctggaagcaaaggggatctccctgcctgccctttacacgatggagtggtgccaggagcggcgggcctggatcggctgctgtcaggacctgcccgcacccccggccctctctgcgctggatcagcccaagaaagtccgaagatctgcggcgaggaggagcagatgaaacgtaaaaaacgagatttttcgccccgggaacgccggctgatcgatggatttattaaagatatctgccggtccatagggctcccccaggggatcagggatctgcaccagtgcgcgtgggaggcatttctctcagtctaccgggacgcccccttcgcgttctgcggggacggcatttcgggttggaaaagggcttaccttatcattcgggaggccctccttcaggagaaacgagacctcgatttctggctctatgagcaggagtccctggatatcccggtgagtccggagatcccagtcccacggctcgagctgctgtccatgccccacggtgattttcaaaacagcgtctgcctccatgactttctacaccgtataaagtcccgggatacccgtcttatggcctacgacttgatggctggagataccatcgacgagatccggacataccgccgctggagcagggatcacacctatcgaacttacaacagactgagactgagaatggaggagtatttgagcatatgaatctgaaaaaagagaagagagacgaaacaacggccagcaggcacatgagctacctcactatcctggggacctatatgaccatctttgggacggtactgggtctggtgctgtcctggggccagctgcgcctggcacacatcgagtcggaacgggccagacgggccgaaccgttgtcgtactctttagaggctgtagacacccattaccagtatgagatccaaaaagatggggcgtccatgtccatcccagccccctccacccgcctacaggtcagccatggcagcctccactccatcactgccatctgttttgatgggacgaccatgcatgagctggcgcaacttcccatccaggacagttgggatgggtgcgttgtggatgtcactatgcctccaaaggccgtgatcccagaggaggggctgatccatgactatttcttccttttcctggagcccacagagggagagggacggctggatctgatctgcaataccatttcgctggagacgcaggaggtgcagagcagggtatatcaccccatctccctgatccagctggactatctccccgaggggccggtgcgggaaatgctctccgcctatgccgtgcttcaggagaggctgggagatctgggcctgatatcggcctgaaaaacagcacaggatcgaagcgcgagcccaacaggacgggggccgcaggaccagtgccggcttgccggtggacggcaaagcccccaaaggaggccggcgagctgtatggagaaggggtaaaaccgatagtttggcattccgaaacggcggcaggaggactgcccaaccggccggcgcatgaattcggtgcaaagcggtgagttgcccgggggcggctttgccgcccccgggcattgaagtcacgaagggtggagcgactaaagggcgcgaaactcaaaagaaaatgcgacttgtcaaaacaagccgcattttcttttgcaaagagcggttaaaaccaatatttctgccagaaacgaaaaatagccgcccgcagggccgcccaccacctgcgagcccagcgaagcgggtcgcaggtggaaaggaggagcagcaaaatgagcgcgctctgacttttcgtgcgaagcataaaaagtcggagcaagcgatatgacgcttgctccgacgtggtggaggcggggagagtcgaactcccgtccgaaaacgcttccccaggaacttctccgggcgcagacggttattttgggagtcttgctctcccagttccctttcctgccggcaagccgtcacgccgacgggtcaggtgagcttcatcgttcatggccggttcaaagctttgccggcgcacgtgcaccacgaaacgacgcctgttcccgggccgtggtcctcccgggtcagacggccgctatttaagcagcggcgagaacggtatcgttatcgttctttaatttataagttgcccgttttcaggtggtcaggcgccaccgcccgctattcctgcttccgcgtccccgtcgaaaccggtacgccccctcgtcgtcacaaagtctgctcagctccgtttccgcctggcggcgaaagcttcgctggctcccttgctcctcctcaccgaaccggccccgcttgcgctgggctccgcttcggatggcggctgcgccgccgggcgaggagttcatattttaaccctgcggggcattccgccccgcaggcttaaaattaaatcagcacttctccggctcgggatagtccacaccgaaggtctccaccgtgacccgcttcatgcgctgggggtcacggggcttgtcattccagtcccgcttggcggagacaatggcgtcggccacctccatgccctcgatgaccttgccgaaggaggcgtactggccgtccaaatgcggagcctgctccaccatgatgaagaactggctgccggcggagttggggtccatcgcccgggccatggacaggacgccccggtcgtgcttcaggtcattggggaagcggttttgagtgaattcccccttgatctgccagccggggccgcccatgccgctgccgtcagggcacccgccctggatcatgaagccagggatgacccggtggaagatcaggccgtcataaaatcccttctggatcaggtggatgaagttgttcacggtgttgggcgcgatctcggggtagagctccgccttgataacgccgctattttccatttcaatggtgatgatgggattgctcactgggatcatatcctttcttatccccgcggagggggtcatcggtttcggctcttgatagcccggtccatctcccgcttggcgtcccgcgctgcggcggagtcacgcttgtcatagagctttttgccctttgccagccccagctccagcttgacccgggggccccggaagtagatggacagagggatcagggagtagccgtcctgcttgatgcgggcaaacagccgcaggatctcccgcttgtgcatcagcaggcggcgctggcgcatggggtccttgttgaagatgttccccttctcataggggctgatgtgcatcccgatcacggacatctctccgtccttgacgacgcagaaggaatccttcaggttcacatggcccagacggatggacttgacctcggtgcctgccagttcgatcccggcttcgtatttatcctcaatgaagtagtcgtggtaggctttgctgtttttagccacgactttgacggaatcggccacaggaacacctcctctccatctgcgcctccaaatacctggggagaatataatgtaccacagccgtggggaaaatacaagtggaatctgtgaacagagggccttttatttatcctttccctgcttgtcccgcacatagatgtcggtgttgttgtcacccacctggcgcacatccacctcgaagcggtccagagatttgatcatcttgctcagcttggagaagccgtagttccgggggtcaaagtcgggctgcttcttcatcagcagattgctcagcttgcccatcagcgtgtagccgtcctcatcacacaagttctctagggagtcggcgatcagctccaccatgtcctgaggcaccgcgctggcggcaggagcggaaaccgcctgctgggccgccttcttgctgctcttcttggagctcttctggggaacggattccttctcctgctgggccgcctgctgggccgcggcccggatgacctcgatgtagacaaatttgtcgcaggccacgatgaaaggcttgggcgtttttttctcccccatgccgtacaccttcatccccgcctcccgcaggcgggtggccagccgggtgaagtcggagtcgctggacaccaggacgaagccatcacagttgccggagtagaggatgtccatggcgtcgatgatcatggccgagtcggtggcgttttttccggtggtatagctgtactgctggatgggggtaatggcggtctccagcaggatagacttccaggtggacatgttgggactggtccagtcgccgtagatgcgcttgatggtgggggtgccgtagacggccacctcagccatcacatccttcatggcggtgcgggaggcgttgtccgcatcgatgagcacggccagcctcaggtccttctcgctgctctggtcaggcatgggggagctcctcccttataacaaaatagtatttcattgcaaattgctccttttcagtcgctccacagggtgggaagcaggtcatccagggtcccccggtcctcccaggccaccaaaagggagccctcctccacggagatccgggcgggcaggcccacgaactcattgctgacccccagggggaagtcgctggtgagctccgcgtggtccagggggtatttcagaccctccagggtgacgccccgggcagtaccgccggcgcagaacacggagacgaagccctccatggaggcggggaaggagagcgtcccttcagtgaccacggctgccgcctcgccttctcccagcagaacgccctgggccccttgggcggagagccaggagagcagctgaagattggccaccgtgtggtccagacgcccgcccagacagcccagcagcacaaagcgccggtatccccgtttcagcccctggcgcagggcgaagccggtgtccgtctcgtccttgaccctggggaggcggaggacctggggatggtctgggacggagcccagcgagtcgaaatcccctactacaaggccggggtggacgcccagccgggacagggtctcatagcccttgtcggccgcaatgaccaagtcgccagggacaggcgtgaggatgaaaccggggtccaggggcatggcccccaccacatagcagagcgatgcatcgtttgtcatatgggtctcccttccgtggacagcagagctgagatgggtgccggcccccaggcagggatggagctggcaagctgaatgagatcacgttttttctattataacataaaatttccccttgtggagaaaaacatatacagaaggggcggagaaaaggaaacagaaggacatgcgccccgcagaggaagaacaaggctgggtcaaaaaatacggggcgcacatcgtgcgccccgcaagctcccggcaacaggggtccggggcggccctgtacggccgccccggactcgccgattgagatccgaacttattttttccgtttccgcttgtcaaagaagcccttgagcccctcttcctcctcctgtgcagggatctcccccatagcggcggcgaaagccctcagggcctccttctgctctccattcaacccagtaggcaccgccacccggacggtgacgtactgatcgccccgcccgcggccccgaagctccgggatgccctttcctctcagccggaaggtggtgccggtctgagtgccggcgggcaggttgtactttacctttccgtcaatggtggggatctccagctcagcccccatggccgcctggtagaaggagatgggctgctcatacagcaccgtggtcccgtcccgctggaactggggatggggctggatatggacgcctacgatcaaatcgccggcaggaccgccgttcttgcctgcattcccctgtccgcgcagagagacagcctggccgtcatcgatgccggcggggatggtcacagcgatgcgcttctgcttcctcacgctgcccgcccccccgcaggccttgcaggggctgtggatgatcttgccggtcccccggcacttggagcagggcgccgtactggtgaaggcaaagccgcccgccccccgctggatgcggacggtcccggtgccccggcagtcagggcagatctccgctgtggtccctgactcacagccggagccgtggcaggcgtcacactcctcggtgcggttcaggttgatctccttctcgcagccgaaggcggcctcctcaaaggtgatggtgaggctggcccgcaggctctctcccttctgggggccattgcgccggccagcggaggacccgaagccccctccgccgaagccgccgaagaaggagccgaacaggtcgcccaggtcaatgtctccaaagtctccagtgaagccgcccccgccagcgccgtagttggggtccaccccggcgtggccaaactggtcataccgggcccgcttctccttgttggacaggatctcgtaggcctcgttgacctctttgaacctggactccgcttctttgtcccccgggttcatatccgggtggtattttttggccagcttccggtaggcctttttgatctcttcgtcagaggcacctttgctcacgcccaggacctcatagtagtctcgcttctgttctggcatagtatcacctctattcagagtgaaaaacggagctgggaaggtggagatgagctcctgcctccccagtgaaacggggtgctcatctcttcactcgccacacttcgctcttccctcttatggaaacgcaagggcgcgcaggcggggcgatgccccgcccgcgcggaccatgaacgtttttatttcttgtcgtcgtccacgacctcatagtcggcgtccaccacgtcgggtccggcgccgctgccgcccgcctggccgccgaaattggcgccgcccatgtccgggccggggccggcctgaccgccgttctgctgatacagcttctcgctgacggcgtagaacgccttcgtcagctcctcggtagccgccttgatggcctccacgtcgctgcccttctgggtctccttcaggtggttcagtgcgctctccacgctgttcctgtcggacgcggggatcttgtcgcccatgtcctccagggtcttttccgtctggaacaccatctggtccgcctggttgcggatgtcggccgcctcccgctgtttcttgtcctcggcggcgaactgctccgcctcccgcacggccttgtcgatgtcgtccttggacatgttggtggaggatgtgatggtgatgtgctgctccttgccggttcccagatccttggcggacacgttcacgatgccgttggcgtcgatgtcgaaggtgacctcgatctgcggcacgccccggcgggcgggggcgatgccgtccaggtggaagcggcccagggtcttgttgtactgggccatctcacgctcgccctggagcacgtggacctccacggaggtctggttgtcggcggcggtggtgaagatctggctcttcttgaccgggatggtggtgttgcgctcgatcagcttggtcatcacgccgcccatggtctcaatgccaagggacaggggggtgacgtccagcagcagcaggtcctttacgtcgccggtgaacacaccgccctgaagggccgcgcccatggccacgcactcgtcgggattgatgcccttgaagccctccttgccggtgagcttcttcaccatctcctgcacggcggggatacggctggagccgcccaccatcagcaccttgtggatgtcactgccagacaggccggcgtcgttcatggcctgacggacagggccggcggtggcctccaccaggtgggcggtgagctggtcgaacttggcccggctcagggtcaggtccagatgcttggggccggtggcgtcggcggtgatatagggcaggttgatgctggtggaggtgacgccggaaagctcgatcttagccttctcggcggcctccttcaggcgctgcatcgccactttgtcgccggtgaggtcgatgccctcggtcttcttgaactcggcggccatccagtccatgacacacttgtcgaagtcatcgccgcccaagcggttgttgccggcggtggccagcacctcgatgacgccgtcatcgatgtccaggatggatacgtcgaaggtgccgccgcccaggtcgtagaccatgaccttctgggactcctccttgtccacgccgtaggccagggccgcggcggtgggctcgttgatgatccgcttcacatccaggccggcgatcttgcccgcatccttggtggcctggcgctgggcgtcggtaaagtaggcggggacggtgatgaccgcctcggagacggtctcacccagataggcctcggcgtccgccttcagcttctgaaggatcatggcgctgatctcctgaggggtgtacttcttgccgtcgatgctcaccttgtagtcagagcccatctcacgcttgatggagatgatggtgcggtcggggttggtgatggcctggcgcttggccacctggcccaccatacgctcgccgtccttggaaaatgccactacagagggggtggtgcggttgccctccgcgttggggatgacgacggcctcgccgccctccatgacagccacacagctgtttgtcgtacctaagtcgataccaatgatcttggacataatttcgttcctccaatatgaaaagatttgtatttacaaggtcaaaagatgaaagagagcagataaaagacaaaagagaacaggaagcacatgctggccgtcagaaacagggcgtagacggccgggtccaggcagaggcactgccggcaggcttttttccggatcatgggatctctcactgagctgtctcctccattctgttttccgtcagttggcgaccttcaccatggcaaagcggaccaccttgtctcccagcctgaagccggcctggaacacctcggccacggtattttctccaaaattctcatcttcaatgtgcattaccgcgttgtgaagggtggggtcaaagggctgtcccagggcctcgatctcggtgatgcccagcttttccagcacagtcttcagctggttcatggtcatctccacgccctttttatacgcctcgtctgcagtctcctgcttcagggcccgttccagattgtcgtacaccgggaggaatgccagcgcggcgtccgccttggcgtcgttccagatggcctccttctccttggcagtccgcttgcggaagttgtcgtactccgccgccagccggagatatttctcctcctgccgggccgcctggtccttcagcgcctccagctcatccatcagagggtcggtggccccggcctccgcttcggccggctcctcagccgcttccttcgcggccgcctcctccagctgatcgtccagctcggggggcgtcttgttcttttctttctgactcatgggctatcctttcctcctattcctgcgcctgcccgtccccgtctccttctccggaggggagctctcccttgccgaacatccgggtcaggctgtcggcgaagtaggacaggcgggcggtcacctttgcataatccatacgggtggggcccaccacaccaatgacgccccgcatgttgtcgccgatgtcatagctggccatcaccacgctggtgtccttcagggcctcgttcacattttccgggccgataaggatgttcatgttcctgccgccgtccagggcgaccggcagcttggatgcctccgactcctctgaaagataggtcatcagcggcttagccttgtccaggctgtgatactccgggtgctccagcaggtgggtgatcccggcggtgtgtactgtcttgcggctctgctcctccaggatctccatggcaaagtccaccaccagggagatcatctcaaaggcacctggggcggagtgggcctccatcttttccagtgcctccagcatctcagccagttccagccccacaaaggagctgttgagcacggcggagagcagctggagctgagtctcggacagctctcccggcacccggatgatcttgtttttcaccacgctggtgtcggtcatcaccaccacgatgaaagcgcccttctccaccatcagcagatcgtaccgcttcactgtcacccgctctgggccggccgcgatggagaacaccgggtagtcgctgatctgggagaggaccttgccggcctggtcgatgacccggtccagctcctccatcttcaggttcagcgctctgttgatccgctccgtctcctgaagggtcagctggtgctgccccatcaactcgttgacatacaaacggtaacctgcggcggaggggacccgcccggcggaggtgtgaggctgttccagcagccccatctcggtcaggtctgccatctcattgcgaatggtggcggcggacacatccaatccagccagctgggcgatggccttggagcccaccggctcggcggtgttgatataggtctccacgatggcccgcaggacccgctttttccggtcggtcagttccattgcacgctcacctcggtgtttttctaattttagcactcatattccctgagtgctaacgatagagtaccacctgacctccaaattgtcaatagttactttatgaatttattttgaacaaacggaagaagccctctgcgatctgttttttgcagagggcttctgaaattgctaatgagtccgtccaaacatggacgatatcccgctccttaaatacccagccgcattccgccggtgaggggctccacccggtcccccagctcctccttcagcagtgcaaaggcggcaggaccagtgcagtgccccgtccacaggtgctccacacccagctccagcagcgcggctgccacctggcggacatagtccgggggacagttgagcgcattggccccaggactgagcatatgcaggccgcccagcagggcatacacccgctgtcccgggaactggtccagcacgcccttcacgatgtttaccacacccccatggcagcaggagttgagcaccaccagcccccgcccggtctccagcaccatggactgctcgtgggaaaagtcgtcgggcaggaaccggtcctcccccaccttgcgcagcagattgggctcccggctggcaaagggcccgccccggacggtctccggcgccagccaggccccggggcagagggggtacagcccatccaccggcacgaagcggtcccggaagccctcccagatctcccgatggatgcccacaaatctgggggagcctcccgacttggagtagtaagcctcccccgcctggggccgtatatacaccggggccctgtcattgagggcaaaaaaggcccgcaggccgtcggcatggtcgtagtgtccgtgggacagagccgccagttctaccccatccaagtccacccccagcttttgggcattgtccgcaaaccggccggaggagcccgcatccagcagaaagcgcctgccccggtactccaggaagaaggacaggccgtgctccgcctccagcccctcccgggccgtattttccatcaggaccgtgatccgcagttccggtgtcatcccgctccactcctttattctttgtttgttttcttctgtgtctgacgctcccctcaggacaaactggtgaacagctgggcctgagcctccttcagcccctggaccagggcgtccacgtcctcccgggcggtgtcgtaggagaagctgatccgcagtatgccgtccagctggggtttgggcagcttcagggccgcgtacacatggctgggcttgcccttgtggcaggcggagccggaggagacatagatccccctgtcgctgaggaagcggagcaccacctcgctcttgtagccgggcagggtgacaggaaggatgtgtggggcggtccccgccccgatcagctccagccccggcacctgctcccgcagggtgcgggcggcgtagtccttcagttcccgcatgtgggccaggtcccgctccaggctggcccgccccgcctccaccgcggcggcaaaggcggcggtctgggccgtgggctccgtgccggaacgcagtcccttctcctgtccgcccccccggatcagcggcggcagcctcagcccccggcggatatacagggccccgatgcccttgggagcgtggaccttgtgcccgctcaccgccagggtgtccacccccagcccctccggggtgaaggggaccttcagaaagccctggaccgcgtcacagtggagcagggcggggcagcgggccgcacggatggcgcgggcggtctcggccaccgggaggacggtgcccagctcgttgttcaccagcatcatggccaccaggatggtgtccgggcgcagggccgcctccacctgctctgccgtgatgatcccttgctggtccggctggagccaggtgacctcatagccctgccgttccagctcccggatgggctccagcaccgcggcgtgttcgatggcggtggtgatgatgtgttttcctttccgccggttcttctccactgcggcggcaatggcccagttgtccccctcagtgccgcaggagaggaagtacacttcctccgggcggcagcccaggccggcggccacttgtgcccgatgctccttcagccgtcccgacgcctcctggccgaaggcgtaccgggaggatgggttgccccactcctccgtcatggcggtcacagccgcctgagcggcctccggccgggtctgtgtggtggcggcattgtccagatagtgaaacatggttctgatttccccctgacgatcaagtatttttcataatatgcccacttctgcggaaagtcaagaaatcccgcctgctccggcctgacagaaaagcgccccagtccttcccctccagaggagaaggactggcactgccttgccccttttcccaaattcgtccatttgataaaatattcctccggtcagagagcgggcttttttgaccgggcggtaaagattccgtgaccaaagtgtgaaggttggggaaaattccttgacggcggaggcggatgtggctatgatagccccaatcactccagagcggagtgagagacccaaggccatcgtggaaaaggaggaaacgatgaaaaagctagtacctgtattttgtgccggagccctgctgtttagtctggccgcctgcgtcggaggcgagacgccgacagggagcgcgtccgggagcccggaccccggcacctccgcccaggagccggcaggctcccagtcctccgccggcagttccagtcaacaggcggacggcacggccggcgggagccaggcccagccccaggggacagagtacaccctgtacatcggcatggatgggacatttcaggaataccctatgacctatgaaggggagctggacgagcagggcctggtgcccgcggaggccatgatcgccggtatggcggagctcaccggctggaacctggatctggcggacgagatcaccagcggtccgggcggcatgacggtgtcttttgccgacacctgctccatctttaccggtccgccggacccccagaaggaggagttccacgtgtatgacgcgggggagctggcggccaccatcctggacagcatccagcataccctccagtacaactttgtggacccggagaagggggagccctcttccctggacatctactactgtgacgccgccggggagagcatcaccatcccaggcctggacgtgaccatccccatggacaccccttactccgggctggcgatggcatgagacggtcgaaaaagcggcaaagccgctttttcgagaaagatgcagtctgccgcgcgcaggcgcgaactctgcgaggcttttttcggcaaactgaggctccctgtctccccctttgggaacagggagcctcttttcttttttatgcatgggtccatcccatcgtttcatggaaagtaagcggacggtcccttgcacttttggaaggactgttttataatacgcatagaaacgctccggccgcgggaagagagagaaggacctgcgaccggaaatcgaagaagaaggagaacgtcatgacagccagtgagaaaaagcaactgatggccaacgcctgcaaggtgcgcatgggcgtcatcgaatccacctatggcgccaaatccggccatcccggcggaagcctgtccgcctcggacctgtttacctatctgtacttccgggagatgaaggtggaccccgccgaccccaagtgggaggagcgggaccgcttcgtcctttccaagggacacaccgcccccggcctgtacgccgccctggccctgaagggcttcttcccctgggaggagctgaagaccctgcgccacatcggcagccgcctccagggacaccccaacatgaacgagacccccggcgtggacatgtccaccggctccctgggccagggcgtgtccgccgccgccggcatggccctggccgccaagtaccaggggaaggactgccggatctacaccctgctgggtgacggcgagatcgaggagggccagccctgggaggccttcatgtttgcccaccagtataagctggacaacctgtgcgtcatcatcgacaataacaacctgcagatcgacgggaagatcaccgacgtgatgagtccctaccccatcccggagaagctgcgggctttcggcttccaggtccgggagatcgacggccacgacttcgagcagatggagtccgcctttgacgaggccagagccaccaagggcgtccccttcgccatcatcatgaccaccatcaagggcaagggggtctccttcatggaggacgtggcaggctggcacggtaaggcccccaacgacgaggagtacaagaccgccatggacgagctgaaagcccgcctggcagaagtggaggggatgtaagatggcagatgtgaagaagatcgcgacccgggacagctatggcagcgcgctggctgagctgggcgcctcccatcccgacctgatcgtgttcgacgccgacctggccggcgccaccaagaccgccgtattcaagaaggcgttccccgaccgccactttaactgcggcatcgccgaggcggatatgatgtctgctgccgccggcgccgccgccatgggactggtcccctttgcctccagcttcgccatgtttgccgccggccgcgcctttgagcaggttcgcaactccatcggctacccccacctgaatgtgaagatcggtgccacccacggcggcatctccgtgggcgaggacggggcctcccaccagtgctgtgaggacttcgccctgatgcgcaccatccccggcatggtggtcatgtccccctccgacgacgtggaggcccgggccatggtgaaggcggcctatgagcatgagggccccgtgtacatgcgcttcggccgctccgccgtgccggtgttccacgaggaggatggcttcaccttccagatcggcaagggcgaggtgctcatggacggctccgacgtggctatcatcgccaccggcctgctctcctatgaggcgctggaggcgggcaaggccctgaaggaagccgggatcagcgcccggatcatcaacatggccaccatcaagcctctggacgaggagctggtgctgaaggcggcccaggagtgcggaaagatcatcacctgcgaggagcactccgtcatcggcggcctgggcgaggcggtgtgcgccctgctcagcgagaagtgccccaccctggtgcgccgcatcggcgtcaacgacgagttcggacactccggtcccgccgccgacctgctcaagcagttcggcctgagcgcggagcatatcgtggaggtcgccaaggacttctgcggcaaataagcggacggcggccccctgttccccctcgggacagggggcttttattgggcaaaaatataattatcgccagatagtgatcattgcgccatagcatttgctgtgatcgagaaaatcgcaatagcaataatttgaaaggagcgattatggcaaagctgatacaggacctcagcatcggcgggaacctgcggaaactgcgggaggcccgggggctgacccaggaggatgtgtgcgccaggatggcacagcttggcagacccatgctccagtccgcctattcccagatcgagaccgggcggagaaatctgttcgtcagcgacttgatcgccctgaggaccgtgctgaacgcccagtacgacgattttttccgggggctggtgcccatcgaccggtacaaggatgagacgcagacgtgagaaaaccaggtgccgccccggggggcggcacctggttttttagtcttaaaagggacctttgtcattttgcccgcagcatccggctggcgttgaggatggccaggaccgagacgcccacgtcggcgaagacggcccaccacatgcccacatagcccagagcggacaggaccagcaccagccccttcaccgccagggcgaagacgatgttctgacggacgatggacagggtcttgcgggcgatgcgcaccgcctgggccagcttggagaggtcatcgtccataagcacgatgtccgccgcctcgatggccgcatcagagcccagcgctcccatagccacaccgatgtccgcccgggagaggacgggggcatcgttgatgccgtcccccacaaaaacaagattttccttgggctgcttctgggccagcaggcgctccacctggtccactttgtctccgggcagcagctcggcgtggaactcatccagacccagctcccgggccacgccctcggcggcgctctgggcgtcgccggtgagcatgaccgtgcggcggactccggcggccttcaggtcagaaagggcctgggcggcctccggcttgggttggtcggagatgacgatgtgaccggcgtattccccatccaccgccacgtggatgatggtgcccatgtggcggcagcggtcctcaaaggagatctggaactggtccatcagtttctgattgccggccagcacggtcctgccatccaccacggcctggacgccccggccggcgatctccttgacgtcggtgacccgggccgggtctggggcgggccggcaggcggcctggatggacagagagatgggatgggtgctgaaatgctccgccagggcggccagctccaacagttcctgttcgctgagctgctgggggtggatcaccgtgacctcgaaggtgccccgggtgagggtgccggtcttgtcaaagaccacgatgcctgcccgagccagggcctccaggtagttgctgcccttcaccagaatgccatgcttggaggcaccgccgatgccgccgaagaagctgagggggatggagatcaccaaggcgcagggacaggacaccaccaggaagttcagcgctctggggacccacacgccccagcctccctcaagcagcagggaggggataacggccagggccagggcggcaaaaaccacggcgggggtgtagtaccgggcgaatttagtgataaagtgttccgccttggccttcttttcgctggaattctccaccaagtccaggatcttggccacggtggattccccaaagggcctggtgacccggacatggagcaggccggacaggttgacacagccgctgatcacctcgtccccggcggctacgtcccggggaagggattccccggtgagggcggcggtatccagcgcgctgtttccctgggtgactatgccatccagggggacccgctcgccggccttgatgacgatggtgtctcccaccgccacctcatccgggtccacctggaccagctggccgtcccgttccatattggcatagtcaggacggatgtccatcagggcggcgatggactgccggctgcgccccacagccacgctctggaagagctcgcccacctgatagaagagcatgacggccacggcctcggggtactccccgcagccgaaagcgccgatggtggcgatggacatgagaaagttttcgtcaaagacctggccgtttcggatgttcttcaccgccctccacagtacatcccagccgataacagcataggggatgaggtagagcaggagaaggaccaccccctgggcggggacggtgtagaggagcaaaaagaggacggcgctgattaggatgcgggagagcatttttttctgcttttttgtcatggcggttccctccagagtcggggacagaggggaagctcccctctgtcctgttttatttcaccaggatctcgcagtcaggctccacttttttgcagaccctgactgcctccttcacgatctcatcaaagcgggcgtcatccccctcgatggtcatcttctgggccataaagctgacggaggcagcggtgacgccgtcgatcttctggacggcggcctccattttggcggcgcagttggcacaatccaggtctaccagtttgaacgtctttttcatcttcaacactcctcaaaacttttgatgggtcatggtctcattaccgccgagtctaccgggatacagctggacgggacggaacacggttggagggaggcaccgccccctccagaaaggcgcagcaggctggcacggcggtctcctccgccaccgcccggcggtccccctcttcggccagggcataggcaaacgtgatccgcaatgaaagaaagccaccgctcactcttccacgtgttccatcccctggctgatgatgcggcagacgtgctcgtcggccagggaataatagagggtcttgccatcccggcggaatttgaccagcttgctgctccgcaggacccgcagctggtgggagatggcggactgggtcagtcccagcagatcagcgatgtcgcacacgcacagctcggaccggagcagggcgtagaggatcttgatccgggtggaatccccgaagatcttgaacaggtcggccaagtcgctgagcacctcatccggcggcaggacctgacggacctggtccaccgcgccctggtgcacctgggtgatctcacagtgatcgacgaattccatagcggtctccttcctaacgattaaacatatgagcgcttgttcatatattatactatgacaagggatcccatttgtcaagaggaatttttaaattttccaaataccggtggagatttggaaaaaaggctgatataatgagggctgcccccgaaaaagggccaaaaacggacgccggggacagaatgacggagaaaaggagcatgttccatgaatgagatgttgaagctgatgcacgaccgacgcagcacccgggcctaccgtcccgagccgctgcaggaggcggtgatccaacagatcctggaggccggccgtttcgcgcccagcgggatgaacaagcagctgaaccatttttatgtgatcacggatccaaattatttggcagacctcaccgctctggtcagccgcaagatggagaactaccgggacaaggacttccgctatggagccccggtgctggttctggtgaccaaccagaaggagagcaccacctgcgtccaggacgcctcctgtgccatggagaacatgatgctggccgccttctccttaggagtaggctcctgctggatcaaccagctctaccgcacccgggaggaccgggaggtccaggagaagctggcggagatcggcgtgacgccggaggagatgccggtggccgcactggccctgggctggcccgccgtggacttccccggcccccgggagaagaccgggaacctggtgtcttgggtccgctgaggcggggaacaaaaatttttcagatcagggggaactttttgggcaggaccgtcgtccaatgtagggtaagacgatcccaggcggatcgatccccctaaaaaggagtttgatctgaaatgatgaagcatcgcacctttgccctgtttttggcccttggcctttccctctccctgctctctggctgcggccccaaggagaacggcagcacctcccagcctggcggcagcacctcctccagccaggggagccccgacgcctcccagcccgacgtttccctgccggatgccagcgccccggacacgagcgcaccgggggagagcgcaccggaggccccccagcctccggtggacgagccggaggcggtagcggcgctggcgctggataaatccgacttttccctgttcaaggccgggagcagctatcagctgaaggccacagtgtccggggtggatgcccccaaggtgacctggacctccagcgatgagacggtggcggccgtgtcccaggacggcaccgtcaccgcagtggcccggggcacagccaccatcaccgccgctgtggaggggacggagctgcgtgcctcctgcaccgtccgctgcaagctgccggaggatcagcccgtttccggcggcgggaacagctcctcccaggggagcgggaatggaggcagctcctcccaggcgcccgcggcggaccaggcagacctgtccgctttttatacccagctgtccggggactatgagttcccctccttcatgcagcaggccgaccaggagctgatggagatcttctaccccggcctgagcgccgtctcctcccagcagatgctggtctatgtgaaccagatgagcatgaacatgggggaactggccctgatcgaggttacggacagcaaggacgtggatggggtgaaggccatcctccaggcccggatcgatgacatgatcaacggcggcgcctggtatcccgagcccacccgtatctggaccgaatgctcccgggtggtgtccaacggaaactacattttgatggtggtccatgagcagtgcgatgccatcgtagacgacttcaacgcgctcttttgaatctgaagcacccattccgcaggcgggcgagctttcgcccgcctgcgctttgaggaggactctcttatggtattttccacccccctgtttctgtttgtctatctgtcactgaccttgctgctctactatgcggtcccgctgaaggggcggaatttggctcttctggcggtaagcctgttcttttatgcctggggcgagcggatctatgtggtcatcatggtagcttccaccctgatcgactacacccatgggatgctggtggagcgatgtaaggcccggggcaacgaccgaggcgcccgctgggcggtggcgtcgtcggtgtttttcaacctggcgctgctgggcttttttaaatactgggactttttggccgcctcctttcaggcggtggggctgaacttcatgccggtcctgaacgtccatctgcccatcggcatctccttttacaccttccagaccatgagctacaccatcgatgtctaccggggggacgcccgggcccagcggtcgctggtcaacttcggcaccttcgttaccctgttcccccaactgatcgccggccctatcatcaaatacaaggatctgggagatcagatcgacagccggacctgcaccgtggagaagtttgcctctggcgtccagatgttcgtcatcggccttggaaaaaaggtgctcatcgccaacaacgtgggcatgctgtgggagagctacaaggccatggcgccgggggacctgaccgtggccggggcctggctgggcgtgctggcctttgccatccagatctactttgacttctccggctattcggatatggcggtaggcttgggacggatgctgggctttgagttcatgcgcaacttcaactatccctatatctccaggagcatcaccgaattctggcggcggtggcacatctctctgtccacctggttccgggagtacctgtatattcctctggggggcaaccgctgctccaaggggcggtgggtcctgaatctgttcctggtgtgggcggccaccggcatctggcacggggccagctggaacttcgtgctctggggattgtacttttgggtactgctgctggtggagaaatttgtcctgctccggtggctgaagcgggcccccggtgcggtaggccacctctacaccctgttttttgtgctggtgagctggaccatcttcgccatcgaggacttcggacagctgggggagtacctgaaggtgatgttcggtctgggaggcgtgcccctgatcgatggggctttcaagtactacgcggccaactatctgccggtcctctgcatctctgccctggcggccaccccgctgggggcggcggtctaccgcaggctgaatgtccgcacggcccatatcctgggggcggtactgatcctggcagggctgttgttgtgcactgcctatctggtggacgggacctataaccccttcctgtacttccggttctgaggaggagatatcatgaccaaagcgtacagcatttttctcaccgtgctcttcacggtgttcatcgggggcgtcctggtgatcagcgccctgctgcccaaggaggagttctctgagatggagaaccgcttcctccagaagccgccggagctgagcatagagaccgtgaaaaatgggaaattcatggagaatgcagagaagtatgtcagcgaccacatcgcaggccgggacctctgggtagccgcaaaggcgtggggggagcggctcagcggcaagcaggagaacaacggggtctattttgcggcccaggacaccctgatcaaccgagtggaggagcctgacggggagacctgggagcagctagaccagaatctggagtatctggaccagctggtgagcaacgccggggtgccggtttacttcggcctgatcccctccgccgcccaggtgtggcacgaccggctccctgacggggcccccactgccgacgaggcggccatcatcgagaccctttacagccggaccgcggcccgcacggtggatctgctctccgtcctctccgcccacagcggggaggagctctactaccgcaccgaccaccactggaccagcctgggcgcctattacggctacaccgccctgatggaggccatggggatggagccggtggatctggcggactatgagaggacgactgtgaccgaccagttctatgggaccatcttctccgcctccggggtgcgctgggtggccccggaccggatcgacacctacatcccggcggatggggtgaaggtgacctcctattttgacgggaccccatcccagggaagcctctatgtggacagctatctggaagtaaaggacaaatactcctactttctggggggtgtccagcccctgtgcgtggtggagaccggcctgaccgacgccccccgcctgctgctgatccgggactcctactccgacagtctgacccccttcctgactcagagcttctcccagatccacctgtttgaccccaggtataacctgagcagcatccagggctatatccaggacaacggcattgacgcggtggcggtgctgtacagcatccccaactatatcgccgatgagtatcaattcgtgctgtcccgctgatgcccggaagaaaagggcacatgaaaatttggaaaaacgattgtaattttccaaagaatcgtgtacactagagacacgaatcaccggaaaaggaggcatcccgtttatgaaggtcgcccgtttcgtactgaagatcgtggccctgtcgcttaccaccgccgccgtggtatgcgcggtcatcgcctactgggataaggtggcggagttctgcggctgcgccggagagaagctgagaaagaaaaccggctgtccctccgagtatgacgactacgtagaggagtaaagaagatcggctgaacttttcaagttcagccgatcttcttttgcgcttgggagggggcgcatggcgtgcacaccccacggcggcattgcgcctgccctggcagaacagggggcggtaggaagctggcgggctcgcaatgcgcgcccctacgaagtgactgaaggtgccatataagggcggctcccagagctgcccgtaagccccccctcctgggggaaggtggcacggcgtgagcggtgacggatggggggcctttccccgcgccggaccgaaaccggcgtgaaggaccaagtctgtccctgcgcgagcatcaagagaggacagtcctgtaagaccatgtccccgtgacgtcctgcaaaaaacaaaatactctcttcctccgccgcgataaaagtccggtttataggacttcttttccgctatactgagagcacagaaaacggaaaggagcaagacagtatggattataacatcgtatgggtaaggggccacgtggaggtctacgactgggccggccggttttgcttctcggccgacaatgaacgggaagcgctggaggagctggagctgacggcgtaaaaatcacagtaaaagaggctgtccataccccggcgggatggacagcctcttttattgcatgggtgcagggccggacaacacctcaggagtcgatgaagctgcggatacgcagcttcacccccagctcagcggcgatctgcctgcaggtctcgatctcctccgagctcttgtccttgtccacaatggtaagcaccacatgggggacataccgggtggcctcccgggcaaagtccagcatagcctgataggccgcctctccctgagcaggatggcacagagccgtatattctgcagcagtgaccgcattgagggagatggagagagtgtcgatgcggcccttcagctcgggcaccacgtcccgcccgaggatcaggttggcgtggccgttggtattgatgcgcacaggtggcagccttcggccgaaacgctccttcagctggtctaccagccagaggatatcgtccaggcggtaggtgggctccccatagccgcagaagacgatctcccggtaggagcagacgtcccggctgaggaagctgtccagcgcctccttccgggtgggctcccgttccagccagagggagtcctccgtataaatggagccttccttccggccgtgacgcaggcagaattcgcagttgcagttgcacttgttggtgagattcacatagagggcgtcttcatactcgtaggttatggtcatgagaaaacatcctttttttaaaatagcccaggggccgccgttctggcggcccctgcttgatgcgtcaccttaggaaatgccaaaaaaccgccggccattttccagcgtcaccgcagcgacctcctccggggggacccccttcacctgggcgatggcctctgccaccagatggacatagccggagtcgttccgcttgccccggaagggctcgggggtcagatagggggagtcagtctcgatcatgatccggtccatagggagccagtcgatgacctccagggcctttcgggcgttcttgtaggtgatgactcccgtaaaggagagcatccacccaagcttgaccagcaccttggcatcctccaggctgccggaatagcagtggtacaccccggtgacctggggatgctcccgcacgatggagaggcagtcctggtgggcctcccggtcgtggacgataacgggcaggcggagggactgtgccagctccagttggcggtggaacacgttctgctggagagcccggggcgggttgtccttccagtagtaatccaggccgatctctccgatggcccgcaccttggggcgggaggccagctgccgcagctccagcagggtcccctccccccattctccgcagtcggaggggtggacccccaccgcggcgtagacatggggaaattcctctgccagggccactgcggtgcgggagctctccaggtcgcagcccgggttgacgatcagctccacccccttctggggcatagaggccagaagttccttccagtcggcgttgaaggccccggagtcgtagtgggcatgggtatcaaaatacatgaaatgattccttattcagcggtaaagtacaccacatacagatcaccgacggactcatcctcatagtactcctcaaagccgagagcaaagtccttctgatcagaggggacctcaaagaccagagagccttccgcactgccggcaatgggaatctcatactcatcagccagttgggactcacaatactggttcagaggataggcaaagtcctcatctccgtcaccccaggcgatcataaaatcatattgtcccattggcatggaataagtctcggtgttcttgatagtcaaatcggccaccaccagcttatagccgtcctgggcagtgtaaccctcatgatcggcggaggccacggcgctgttgactgtaaaatcaaagaaagcggtggaaatggtatcgcctacatggtaggtgccgtcgctgctgctggcactgccgccggaggagcttcccccctccatgccggggatggagccgcaggcggagagcaggagcagaatgcttgccataagggaaaaaacgattctctttctcataattacaacacctcaatttaatacgtcgttgcggggggaggatactgcgctcattataccagaggaagagagggaacgcaagcatgaacgggagaaagagaagatgctcaaagtgcttccgataagtttaatttggaatattcctcatcgctgaccggctcacaccattcattgcgggtgccttcccctgggacctccactgccagatggatgaaccagctgtccgcttccgccccatgccagtgtttgacgcctgctgggatatggaccacgtccccggcacgcagcgcgcgggcgggctgcccttcctcttggtaccacccccggccgccagtgcacagcaggatctgtccccctcctttggaggcatggtggatgtgccagttgttacggcagccgggcgcaaaggttacgttgccgatggctactccctgggtggagagcatattcagatagctctgtcccacaaaatactgggcaaaggcagtattctcaccgccgcgttcaaaaattgtgtgaatgatctcatgtttcatagggatgtcctcctgcattttatccagttccaggtttagtctggccgggactgctgcgactggagatgacggagcagatgctccttggtcatcagcccctgatcgtaccgttcgattttgtcattcagccggtccagagagcgctgcatctccgccatccgctccacaagctgatcgcgctgttctatcagcagagccttgcgggcaccaatggtctcatccccctgctggaacagggcgacatattcgatcagagcctcgatctgtaccccggcggaacgcatgcacttcatcagctcgacccactggcaggactctgtatcgtagtctcgtatcccgcttttattacggggaacagggggaactaggccgattcgttcataatagcgcagtgtatctgcggacagctcatattttttgctgacctccgcaatagtcatagaaaccgcctcctgctgcaattagacagcggctcacgcaggaccgcttgataacagattagcacctggagtccactccatgtcaagtaccccctgaaaattttttgatccatggctgctgagaactgccggcaaagcaggggggtatcccggagggaagtgccgcagcggtgaaatgtaaaaaagcaaaatgtctaccaaaagtctaccaaaaaagggcggcaggggcctggagtttcagggcctcgccgccccttctgttttcgtgtgtctaccaaatgtctaccagggaaactttttaggcgtgatcccagagatttttctcctgatctccccctttttataaccaattcctcctgtgtcagaagtgttgtacaggcatagtgggccgaaatgttctg

SEQ ID NO: 13561 - DNA, 89025 bp, Unknown
  gut microbiota DNA sequence
agacagcatcatttctaaaaaacccccttttttctgccgttttcccgtaatttttaataaaattaagttggcacagaacttgcttgtattaatctgtggaattccaaaacaaactataaaatgggaggaaatttgaatgagtaatgctgttccgcagaagaagaccttcttccagatcgccaacaagaactttattatgctctttgtggcgtacacggtcatctgcatcacccactctatgaccaactctgtcaccagcgcaggctggcggctggccggcatggacctgaccactatcggcctcattgccagcgccatgagctgggccgccttcatcatccgccccttctctgcccctattaccgaccgcggcaacaaaaagctgatctacatcgctgcagtgggggccctgaccctggctgtgttcatgtattcgctgagcatggacaactccgcctttgcagtgccggccaaaattatccacggcgtatcctggacttttatctccactattaccgccgtcatcgtcagtgagtatgttccccgggaggatctggggaccgccatgggatttttcatgatttcccagatgatcgcttctgcggtctcccagcctgtggcctttgccctggccgagtacatgggctatgcctccatgctgctggtctttaccgccatctccgccttcggtctggtgctggtgtgcttcaccgcccccaccaaggtcccagcgcgcctgcccggccagtccatgttcggcggcctgaagctgaacaacctgtttgccaaggaagccatctcccccatgatcatcaatgtggcctttcagggcacccggaccggtatcaccgtctttatggctgcctttgccctggaggagctggggatcgccaatatcggcgtgtttgccaccgccgcctctctcatgggctgggtcgcccgccccgccctcggcattctcctcgacaagaagggacccattgccaccctgatccccgcaggcctgttcttctctgctggcctcctgtgtctcgcctttgcccaggatctgacctggttcattatctccggtatcctgatcggaatcggccagaatggcatttctcccgtactgatgaccatctctatgcgcaccgttcctgcggagcggaaggccgctgcaaattccaccaactacctgggcatggacatcggttctgcactggcctccacggtgggcggcgtgctgtgcgctgtgttcggttaccgtgtgggctttgccgcctttgtcgtccctgtggtcctggccgttgccctggctgtggtaattttgtccagattggaaaagcaggaaaggactgcctgactgtttcgctcccccacatttcggtcagggctgtggtataatcgttatatttcacccacgggcctgggggcggctcagctgcgtgtgtcctccccctcccggagcaacgccgaaacgaataaaggagcgatgggatatgcactcagacattacgttcattgcctcggacctgctggccgccgaaaaggtccagaatattttgcgggaatcccctgccaactgccaggtggtcctctccaatacccaggatcttgaggaggtatcccgcagccaagtagcccagggcgccaaagttctgatcgccttcggcatgtttgcaaaaatcgtgcgccagagcgtggatgtccccgtaattatggtggatctgcaggcggaggacgttatggacgctctgctggaggcatctaagctgggaaagcgcatcgctatctttggcttccgccgagttctgaaggatgtgttttatgtccgggacctgctctccattgatctggtatggcttcctactgtgtccccggaaaagatcccccatgagctggagaaggtccaggacatcgatgtactggtggggggctactatcaggccaggatcgccaagcagtacgggatcccgactgtactcatcaagacccgggattccgagatccgaaaggccatctctctggcccagtcctatctggaaaagcggcaggatgaatccgagaccgggacccccatgatggagtcctccatctatgccgccattacggtggactgcctgggtgagatcctgatgatgaatcggctggccagcgaatatctgaagctggaccagctcaatgcagtcgccttttctgtggatgacgtctgtccccagttcagccgcatcgctgacgtcatctctactcgccgtccctatcttaatcaaatcgccaagctggaagaccgaatctttctctaccatgcggagcccatcctgcggaagcgggacggcacgctggagggtgtgtcggtcatctttcaggacgtaaacacggtcatgagctccgaggtcagtatccgccgtacgctcaccaccaaggaaaatcaggctgtctattcctttgaccacattctggggaacagcccctgcatgacgcaggcactcaggctggccctgcgctactccaaggtggacgagactgtgctcatccagggggagacgggtgtaggcaaggaaatgtttgctcagggaattcatcgggccagccgccggcgggacatgccatttgtggctgtcaactgcgcctccctcccagaaagcattctggaaagtgagttgttcggctatgtaaagggagcctttaccggagccagccgggacggcaagcggggcctgttcgagtgtgctcataccggaactatttttctggatgagatcggtgagatctctccctccatgcagggcaagctgctgcgtgtcctgcaggagcacagcatccgccgtattggtgctgagactcccattcccattgacatccgcattattgttgccaccaaccgtgatttggtctctatggtccgggagggcaccttccgggcagatctgtacttccgcatcaatgtgctgggactgtgtatcccgcctctgcgccagcgccagggggacattatcctgctggccgacgcctttctctccgagacctcggagcgggcgggacgctatctccgcttcagcagccaagccaaagccgccatgctccgttatgactggcctggaaacatccgggaactccagaacatggtgcgccgggtcagcgtcatcagcgactccgatgagatcggtccggagctggtggagacctatattcaggaaaacagggggctttccgccgtcggtgggagcctccgcagccgctatacgctggaggaagccctggccctcagcggcggcaacaagctccgggccgccgaactgctgggcatcagccgcgccaccttgtatcggatgctggagcgaaaggggatgtaagcttgctcaatacgatcctgttttttgtttttatcgtgcttgccctaatcctggggaccaggctgaacatcaacattggcctgatctcgctcagctttgcctttctgctgggcaccacagcaggcggtctgacccccggcggcgtggtcgccctctttccagtgcccctgttttttaactttatggtggccacatttctcttcggctttgcccaggaaaacgggacactgaaaaaagtggcggaacatctgctctactcctgtcggggggcaggctggcttctgggtctgttgtttttcggcgtgtccgccattgtggccggtctgggtgctggtggggccgctcccttcttcatgtctgccatctgcttcagtttggctctccaggcgggcatcgatccgctcctggtatccgtggcgctctggacctcctccatggtgggtggcagcatgccctggacctccgggtatgctaccaatgtgggacagctggagatctacttcgatctctccacttcctcgggatatgtggtggacttctttaccttccgcggaatattttacaccattctgtatgtggcaatgtttgttctcctgaggggctggcgggtcagatcctcggcggtctctctcaccagaccggccccgtttgatactgggcagcggcagactctctttatcatcctcggcatcatcgctatgatcgtggtgcctgccgcagtccagctgctgttccccaatcctgtgacccagtggatcagcacctactgcagctttcagtttcttgcggtcatcggcatcacgctgaacgtgcttctgaaaactgcggattatcaccgcgtggttcagacgcgcatcccctgggacaccctgctgatgctctccctgaccggcatgtacatggccctggccaactccatgggggtcgtcagctatctgtccgatctgctccagaacaccatccccgcccattggatcctgcccggggtagtgctggtcatgtgtgtgctcagctttttcgtctcaggcggcgtggtggttcccatgatgcttcctctgctttccgccctgtcctctgcctccggtatgccagtggggaccatttactgcgggatgcagatgggcctgaccgccagcagcatcagccccttttcccaggggggcgccgccgtgctcaccggctgcagtgatgagtccctccgccgcaggctgatccggcagcagaccatcctcgcccccattttttccgcagttcttgtttttgtcgcaattctaggcggctttcgtctggtcggttaacgacggacagccgcagaaaggagggggaccaccttgcactatgtcccctatttggaaggccgcttccataccgcctcccctgattcccagggcgttcccagcggtgcgatcctgcagtttctgaccgagctggaccgcctggatgtcgatctccacagtctgtacatcttccgcaacggctttcaactgctgggtgccaaccgccgtccctatcagggcgacaccccccggcgcatctattccgctgccaaggccctcaccggcctagctgttctgttcgccattcaggaaggactggtctcactgaagacacgcctgactcagctttttccggaagatctgcccgaaacagtcacccccaggatggaatccatcaccgtctaccatctcctgaccatgaccaccggccatgatcgggacaccttccgaccggtgctcaacagcaccaacagcgtccgcgcctttctggaggagcctctggactttgaacccggcacccattttctctacaacaacggtgtcccccacatcttgggcctgatcgtgaagaaagtctccggcatcaactatctggacttcctgcgcccccgctttctggagcccctgggcatctactgcactgtggaacagacccagcgcggggagctggagggctcccgcaccatgtgtactgcggaaggtttcgccaagctctccctgttctatcttcaggagggcaattggaatggacaacagctgctggacgcccgactggtgcgggcagctgtctccttccaggtccctacccggcgctgctcctctatctccttcatgcacagcgaccagctggcaggctacggcttccagctctggcgcaacgcccgggagggagcccgcctggacggcggccgcagtcagttcggttttctgttcccggacaaggaaatggccatcgtctgcaacgccattgaggaggacagcggtctgatccctgccgtcctctgggataccctctattcagccatacagccccaagccgtccccgaccatggagaatccgcccgtctcaagtcctatctgtcccattggtcctgcgctccgcgcacagcggcacagcccagctttctggacgactactacggctgcgtctatgtgctggaggagaacccctggcatctgcgcaccctctctctgtccctgcgggagggacagccccatatttccctggaaacggatcaggaatcctgtactcttcaggtcggtctccatggggattggatcgccaatgatgcctttctttccatgcccatggaaaacgaacggctgaacatgatgtttcacacgggtccggtccggcactgggtcagcggcggctgggcctctgatttctgcttcatctttcaggtccgctccacagattggatggactacaatacattttactgccgtttcaacggccagcgtctcagccttgttgtagaatccaacatggagcgaatgagccactgccgccgccgcattcccatgcggccctggccctatccagatcatcaaatcgagggaaaacgtcaatctgcaaactgaggaggaaccttttatgcccattctgaatctgaaccatgtttcactctactatgaagaattcggtcggggagaccgctatctcatccaggcgcagcagtttgtcaacagccatatctactataccaaggatctggcggaccgctgcggctttcatgccttcatcatccgaattcggggctatgccccctcctccatggtcacagaggacctgggagacgactggtatgacgtatgggctcaggacgtagtggatttcgccgatgccatggggatagaaaaatttttttacaccggccactcccacggtgccggcattggctggcatctgtgcatgaaccacccggaccgcctgcggggcttttttgccagcgggagtggtccccatctcaaggacggcaagccaaccggctctgcccgcatggacaccatcaacgcagcgaaaagccgggagacctgggtcccctatgcggaaaagcaggcctcttactgtgccaaggcgtttgttcctctggagtctgaccccgtcatcggcggagaggccaaaaaagcggtagagcagactgtggagttttggaccaacatgcccgcccagtccgctgttctcaatccccggaaaccctttgcaaaagttcagacagaggaggagcttgcccaggtgctgggccgcatcactgtccccaccattatgatgggcgggaccgaggacaacatcagcagccccgaactgatgctccgcactctcagggccctgaaaggctccaagctggtactccaccagggggtggaccatgttgaccttcccattaagtgcagggaggactatgtgggggatattatggctttctgtcaggagcggggtcttctgtaatccagcgctctctcctgctggcaggggcggcgtactgcccccggacactgatacgataaagagagatgcggctaccggctttgaaaaggggacgcgtcaatattaataaacggtcacatgaatgttggtgtgagggactggacggaggccgtcttttggggcaagggcacaaaaagaccgcgcaggcgatacggggcaactcccataaggaagttgccccgtatctgggtacttgtaagtgaaaatcatttgattaggacggcgtggcagttgctatgccgtctttttcttgcgcttccgcatggctcggtaataagccatctattcctgttccagcgtttccgggtcgggttctgtccacaggccaatggtattgtagtggatatccactgtctgatgccgcttgccgtccaatttctccggcttggataccacgatcttctcaataaactcatggacgatctcaggcgtcagctccgtcagtcgggtcacctgtctggccctctcaatgaaacgctgaaaatcggcggcggtagcatccaggatggcttccatctccgggatagccgctttcaactgcgtctgctcggtttccagcgataccgtcagcgtggagaaccgttcctcggacaggcccttggtcatgtcctcgtagcttttctggataagctggtcaatttccgtcacccgctgtttggccttgtccagttcctgcgtttggcggtcagcgcctttttctcttgcaggccaaaccgctccttgaccgcctgcatctcctgaaaggcggtgtcccggttacagtttacgccggtgacgaacatggcccgttccgtcctctcaacggttttttcttcgttcgcggcgtagtggagaacattccgcaaatccaagtaagtggttttctccgggttttgggcgtagtccaccacacgggcaaggctgtccttggcgggccagattttagtggtcgccatcgtccacacccccgctggtgtaggccgtcaggatcagacccgccaactcgtccagttgggccgctgtccgctccatgggctgggtagtgggatcatcccgcaggccgttgacctgccggtagagttcatggaatcgttggctgtgaaaagccgccacaggctccccagtgcctacccgccggagatacccggacagggacaggccgcaccgcttggcttgacgttccagctttctcttttcctgttcagtcacccgcacctggatggctgttgttctctttctgtaggtcatgttgagccgctcctttctgaccgaggttacaggggcggagcccatttcggcgcaaagcgccgcccgcttttggggcgcccccggcaacacaaaagctatgctctctaccccacaagacaggggtcaggcggcttctctttctgccgtggccgggggtgaactgccctcctttcagccggtctaaaagagcaaaaaagaagccggtacatagacgcaccgaccccagcgggagccttgctctcgctgaggttcttgtgttggttgtctatgtaccggatgaaaggccgtattcaatttgtgcgatatgtgggtattaaattacatagcaaattattcttggcaattttctgtgtgcacatatttgttgtagaatcatttcggaaaattcaggaagccctgcagtaacgcacctggaaactgaaactttttctctgtctcgccaaagagtacaattatcatgccgccttagacttctttgaccgtcctcatgccgaacgccttatgccgaagctgactaccaactgtaacacgggacagatccacctgcttttgcggcacaggctgtaccggggttggtacagctgcggtctggtgcggcttttactttttgggctgatccatatcccggacagcttccgcaaaatccagaaatggcttttccggcaaatcatctgccgaaggaattggtacttctatcaaagcctgttgcagagcgaacatactgttatagtcagcatccatgataacagtatcccaaccgccacggttctcgccttcatgccggctaatgccagtatagctcaagctggtatcttcgtatctcttgaacttataaacggcatcgttcatcagcgaatcattgaatacaccgagagacaccaataattcaaaagctttaacatccagacctgttactttcttaaaaagccccggttccagctacgtgataacatccttcaaagagcgttcccggtactcggtcagatacatgaaacccggaatgcgggtggcgaacttaatcagttctcctgaatctgtttgcgtttggatttatactctttttcttcctcactcagctcatttttctcttttgaagtgagtttttctgtactttctttctttgcctttttaacggcttcggacttattgataatggtctttatatcctcgttcagactacgaaacccctcaattttcatcaaagcatccatcgccgccggatttgccatcaaacgggaaaaagtatcgttatccacattgacaagcaacgcactttcccaacgtttggcaagcagggtggcaggtacctgccatagcaatgtccagaatctcacctgcatcaacctgctgcatggtgctaccatcataggcaatgactggaaggaaattgataaactccgccgatttcttttccgggttaccttcgtcaatgtttagacggcaactgtaatcggaaatctgcttgagcgtccggtcaagcgcaaagtcaaacacataacattcctgcttgacaatttcctttttcccgtcgtctgttgtaatctcccacaggctttgcacccggaacgctgcctgaaaataggttttcgggctgggcaggttccgcaacatagaaatccccgtccacggcttgactgtaacacccgttgttagcttgccacaggagagggagattgtcttactctccaacgggtcacgcatggatttttgcaccggctcctgtaccggcgcagacattgatggtgtaatcatgatagaaggtgttttgcttctgcatcagcagatttttcatcgcatagcaggaagctacattgggcagaaaccaaagtgtatgctgcaacacattcagcaagcgtacatcggcatacggcatggcgagcttcttatctcctagcttcaaatcatccacccaggtttccagataagcaccccgaatcagatccagccacttctgcacctcattttcatagacaaagcgagcgtctgtgcctttggcagagaaaaacacatttaggtcaaactcgttgaactctcccttcatggcgatctgacggatactgtccaggatacggtaagtcatcatcactatgcggggcagtgccgcataaccaagcaggatcccccgctaaacaatatgagcgatttggacctgttccatgcgggcggtcgtctcgaacaacagctccatgaaatattttgaaaagtgggtgagataccgttgccggtggcgcaaaagagatagggactgtgtcataggtccatttccctccaacaatgggaagatgttcactccagtccccagctgatccagatggcttaacagggccatatgagttgcaaagcaagcggtaacacccatggcacagagcggcatgatctgggaagaggaggggctggtgaaaaacacattgggccggattccggcacgtttgaaccgctcctggagcaacctacccagccgggtatccatcatggaaaaggggagccgggcgaaatcttccagaccgacgtcctctgtggcccgagccttgacggcctgtatctcctccgggctgtagtactgctgaagcaatccttccggaacgcaaaggtaaaccgggtcctgcaggaactcgtgctcaatcaaatcggggtggtactcctttgagaaggcgatggcaaagtccaattctccattgaggatctttttctccaactggaaggcccgcccatcctcataggagacagatacccggggatattttttgtgaaaatccggaaggatctgaggcaggagctgaatactccttaccgtgcttgcccccacccgcagggtgccacgctcctggcgctcgatgtcggagaggatgtccttcaggttgcgttcctccttctccatcacctgggcaaagcccagcacgaactccccggcacaggtgagcgatagggagggcttccgataaaaaagaggtgcattgtagtactgctccaggcgctgaatgtggttgctgagggtctgctgggatatgtagagtcgttcggcggtcttggtcatgttcaggtctttggacagctcctgaaagtagtgaagactgatcagatccatgggcccctcctcttctacaaaattattttgttgaaaagtgaaaaaatctctgtttgctttttgggttagtccatattaccatgaattcgaaaagagcacaacattttttgtgaaaaataaatatcgatagagagtgaggaatgtttatggcgacccgtgtgctgatcccccagcccattctgccggcgggctatgaatatctgcggaagcatggctatgaggcggtggacggcagaggatttaccgaggaggacatcatcaccgatatcagggattgcgatgcacttattgtccgaaccgctcgaattaccaggcagatctttgacgcggcccccaagctgaagatcctggcccgccacggggcaggttatgacggggtggacctggcggccgcccgggagcacggagtgctggtatgtaccgccggcggagccaacgctatctcggtggcggaactgaccatcttctacatgctctactgttcccggaacttcaaaaaggtccagaacctgtatctgcaggactaccgccaggccaagatgggcgtccccaagacggagctggagggcaagaccctgggtctggtgggcctgggcaacatcggcaagctggtggcccaaaaggctgccctgggttttgatatgacggtgctggcctatgatccctttgccaagggcgccggcctgcctgattatattcggatggtggaggaccgggacgagatattcaagcgtagcgactacgtctccctccatgtgcctgccacaactgagaccgtccactccgtcagtgaccgggagttcggcctgatgaagcccaccgcttatctcatcaacgccgcccgggggagcatcgtggacgaggcagccttgtaccgggcacttcaagaggaaaaaatcgccggggcaggcttggacgtgctggagcaggagcccatcgacccgtctaaccccctggtggccatggacaacgtgctcaccgctccccatatcggcggtgccaccaaggaggcctctagccgctcctccgtggcctgtgcccaggctatcgacgatttcttctccggccgcactccaaaatttgtggtgcccgagctgcgtgacctgattcagaaataaaacaagaacattactgaaaggagaaaatcgacatgagcgtaggaaagaggatctatctgcagcgggagctgcccgccccggaactggtggaggcttttaagtccatccccgcctccaacaccgccgacgtgatgggccgtagctgtgccatgaacccccgcatccgcctggtgagcagccccaaggcccagatgatggccggccccgcctacaccgtcaagtgccgagcgggggacaacctgaccctccacgccgccctgaacttctgccacgagggggacgtgctggtggtgtccaacgaggaagacgacacccgggctctgatcggcgagatcatgatggcctatctgcggtacaccaagaagatcgccggtatcgtgctggacggccctatccgcgacattgacgagatcggcaagtgggacttccccgtgtactgcaccggcaccacccccggcggcccctataaggagggccccggcgagatcaacgtccccatcgcctgcggcggggtgagcgtcaatcccggtgatatcatcctggccgaccctgacggtgtcatcgtgatcccgcggaaggatgcccccgtcattctggaggatgcccgaaagttccaggccgccgacgagactaagttggccgccgccaaggacggcaccgccaagcgtggctgggtggagaagtccctggaggaaaaggggtacgagatcattgacagcgtataccagccgtaagcggcacaaacatattaaaaaaggagaataatcaatgaaaaagatgtttgcacgtatgttggccctggctatgacctgcgtagttctgctgaccggatgtggtcaaaatcctagttcctcagtgtcgggcagtgggggtaatggatccggtgtccagagttctggcgattggccgaaacagccggtaaatgtgatttgccccgcctctgccggcggtggcaccgaccttattctcaggacaatcaacgaatacttcacacgcatgacagggcagccttttgttgtcaacaatatcacggggctgacagggtatgaaatgatacatcagggcaccaccgatgggtatgattttatcatgggcaccaccactatttttaccagtgagctcgatgggacccttgactatgactggaacgactatgagatggtcgcgtttattgagggcgacttcaatactgtgattgcggtacaggccgattccccctatcagacgatcaacgatcttctggatgcagccaaaaacgatccgtccagtgtcaccggcgggattacgctctctggtcagccctatatgttctctaaggctctggctgatgcagtgggtatcgacctctactatgtggattgcggtacaacagctgagaggaatactgcgttgcttggtgggcaggttgacttcatcattactaacgtgctttcttctcaggcatatgtggattctggtgatttccggtttatcgccattgatggagacgagaggtttgaactggctcccgatgtgcccaccttcaaagagcagggcgtggatttctcttttgcggcacagcccatggtagtcctggcgcccaagggaactccatccgaagtctgcggggcattcaacagtctgctggctcagatttatgctgaccctgatttcattgatacttaccgggagactttgaccatgattgcgcacccggttccgtctattgaggaatccctccagatgggagaggagtttgccggaatcctggctccctatgtgtgatgacgggatgcatctaaatgaggggactatgatgaaacaaaaaattgataggctggcgggtgccattgtccttgggtttcacatctattgcgatgtgattttgggggctgttttagcggtggtaggagcggctggtttttatcactcctttttcataagaatcatgagagagcctgtggctgcagtggatacggcgaggttctttccacagttggtatttggcgcgctgattcctgtggggattgtcatggctttgctgggaattcgaaaaatcaaagtcaatcggggctctgcccccactggacaagtgctggacaattccgtacaggcattggagcggggcatcattatcctgctcagcattgcggtatttattgccttgatggcgcccctgggatttattcctactgcgatcctgtatatggtgttcagcatgttatttatgtccacgaaggatggttggaaacccgtgatttacgttgtgactgcagttgtggtcgccatagcgtgtttcttcctgttcgggaagttcgtgtatgttgaactgccgactggtcttttggaaggagtgcttggataatggacggcttgttaggaggattttccgcactcatgtcgcctgacctttgggctttgatgctggtcggtgtagtggtgggcatcatcttcggtgcgattcctggcctgagtgcgacaatggctattgtcctgttcttgccaatcacgttcagcttaaatgtgtatcaagcgtttacgctgctggtggccctgtatattggtggtgtgtccggcggcctgatctcggctatcttgatcaacattcctggctcggctatgtccatcgccacttgttacgacgggcaccctatggccgagagcggccatgccaagcgcgcgctggggatcggcattgtgttctcgttcctggggacgatattcagcctgatcattatgatcgttgccgcacccaccctggcggattttgcggtagggttaagcgcttatgagttctttgcactgacatttttcgctttggtcttagtatccagcgtaggcgggaagaatatttttaaggggttggcagcggccttaatgggcttggcctgctgcatgattggcatggcgcctgtagacggtgcggttcggtattcctttgggatcaccggcttgctgcagggaatccccttgactcccgctgttatcggtatgttcgctgtgacagagatattgctcaatgcgactaagccgattaagcccgggggagtggatcagaggaaaattgaaaaaattcgggggtttggtttctcagtcaaagagatgttctctcaaatgaaaaacttcctgatgtccagcgtgattggtcttgtgatcggatttctgcccggtatgggtggctccttggccaatcaagtggcctatgtggcagcacaaaagacatcgaaacatccggagaagtttggaaccggtatcatggacggtattgtggcctcggagacatccaataacgcatccatcggcggggccatgatccccctgctggcgcttggtatccctggtgacggtcccaccgcaatgctactaggagcattcacgatccacggcctagttgccggcccccttctgttcaccaccagcggtaatttggtaaacctgatttttgccgccatgttcgcctgctcgctgattatgatcgtggtggaatttttcggcatccgcatcttctctaaaatcattgatgtcccccgggagatcctgtacccggtcgtgctggctatctgcattgtggccgcttatgccaacaaccgcactatgttcgatgtgtggctgctgtttgtgttcggcgtactgggtttcttaatggcgaagttcaagattccacgcgcctgtttcgtactgggccttgtgctgggagaaaacattgagacgaatcttcgccgggcgatccaattgggccacggtagctttgaggaattctttacccgtcctattagctgcgtactgttgatcatttcctttgtcatcattgctcggacaatttatgtgcaggttcgcagctcgagggcgacaaaacaggcagcaccaaaggagtgatttctgtggctggaattgaagatcgtgtgaacaactggctgaaaaatccgtggacacttgcgcatcgcccgttcaaagttgtggacaatgtttattttgtgggaaccagttgggtatccgcgttcttgctgaatacgcaaaaaggactggttttaatcgactgtgccatgcaggagacgctgtatctcctggtagattccattcgggaactcggtttcaatccccgtcagatcaaaaagctactgctgactcatgggcattttgaccactgcggtgctgcccgagcaattaaagagatgagcgggtgtgagatctggttgggaaaggatgatgagtatttctttacggaacgccgtgacctaattgcatttgaagatcatgtctctggattccccattgataggtttttcaattattcgagtaccattgatttgggaaatttcgttcttcgcccggtccattgtcccgggcatacacctggaacgacttcaattttctttgatgtggatcatcggggcaaaaaactgagctgcgcacttcatggtgggttgggcaacggagttctgacccgtgattatctggcgaaaaaaaatcttccgctggagacgagagacatttatctgcggagtctggatcaggttgtggatgccaaggtggatgttgttctaccctctcatgctgggcattgtgtaggccatgatttctttgcaatcgctgatcaggatgacggtagtggagccgggtttattgatcctaccgcatggaaacggatgcttttgggaaagcggaaggaattgctggatctgattcaaactgagggataattttcatcagggggccgactctgcggcataaacgcaagccggccccctcaaataggcaggttgatagattatgtaccaaatcatcatcaaaaacggaatagtcattgatcctgcaaatagatttcacggccaggcagatgttgccgttgccgaagggaaaattgcagggatcggtcaatatagtaatgacgccgtaatggtcgtggacgcctccgggtgtatcgtcaccccgggcctgattgaccatcatgcccacctttacccgctagctaagattggaatacccgctgaggcaatgtgcttttcctccggagttaccactgcggtggatgcaggcagcactggctgcgatactttttcagccaacatcctgttcatggatcagagcaagttgaccatccgggcgtatctcaatgtttgttctaccgggttggactcgctgccgcaagagatggaggatgttgacccggcccatttcgatgaaggtaagattgcagctgcctttcagatgtatgggcctatacttcaggggctgaaactccgcaccagccgggcagtcgtgaaggaactgggctatgcgccgctaaggagaaccctggagttggcaggaaagctgggcgtatccgttatggtccattgcactgacccgccgggtgaaatggatgaactgctttccatcctgcggcctggagatgtgcttactcatatgtatatgaacaagggcagcactattctggacgggaaaggaactgtctccaaggcggcctatgatgccagaaaacggggagtgctgtttgaggctgcggatgcgcgggctcacttctcgtttgaggtgggtgagtcggccatccggcagggatttcttcccgatttcattgccactgatctgactcgattgagcatgaatctgcggcccaccgccttcaatatggccaaccagatgtccaagtactatatgatgggcattggccttgatgcgctgattgcctgctgcaccagcatccccgcaagaaatatggggcttgccagcgaagccggatgcctctctccgggagcttggggagatgttgcggtatttaagctggaagaatgtaatgctgagtttggagatcacccctattctaacccgcagtgtcagttgcggcagggctcaaagcggttccggccggtgttcactgtgaaaaacggagaggcagtctttcgagataccatgctgtagttttgattctctttcctgctgattcctgtcgtgcaaattttattggaaattcacagcaaaagctatccaaagaggaacaccaacaacgcaactaccatcttattgtccatcgcgcggtctttgaaagcattgtgctggaaacaaaagacatgaccgatgggggaactaccaccctgttgacaagacactttgtgtacgataaacggaatccacaacatagcagggcaacagaatatggcctgacctagctattcagccgttacatagacgaccacgcaaggccccccagcgggaggagaactcccgccggggctggtacgcctatgtaacgcttctttgtacgcgctgacaagtgaccgaccggccgaatgagacaccgtgccatgacctcgctaggagagagcgggacaatgccgctgaaagccattcgggaagagcggcaaaaacatatagcagcaaaattaatattactgtaaggattgttttctttacaggctagccgaaggccgacacttctttacggagtgtcggccttcgtgtttgacttgcttactatgtattgacagagcctatttgtccccgacactccggcctgcaaagggaagtcgtcaagcggcggtgtgccgcaccgcctcacgggagtttcaccccaactgccagagccacccccattgcttgagactgtggctgggcgggagtaccattgtcattctgactgtcatcgccgcgcaaagggcaaactggcgcttgcagagggtgttctcgctcggtccgataggacagggtcatggcgtaccctgctgctgtggctcatgctttcgtacatcggaactaatgtacttgacgaatgggtattcggttatcaaggagcatcgagagggttgcgaccttcctaacctttaccacgatttttgaagaccaaaaccgaacagagatttgtggaaatcgcataaatctttagcggggagatctgcggacggcaataagtcctctcaactccctactacaacttttacgactcaaaacggaacttttattttccgggcgttttgtacaaagttttccgagaaacattttacaaatggacatagccttttcagcagggatagaagcaaccgctcccaacgctgcaaacaacttcttacatactaaaaaacgggctggcagaagcgtctgcgctgataaggatgtttttgggttctaaacatggccccaggatgttacggcatcctggggccgttttgtcatgcctggccgatgaaattgaagtaaatatcaacctgctgggtgtaatgctttttcttgtaccgcccggagcgttcgtgtatctcaatccgctggataaactcccgcaccagttccggcgtcagttctgtaatatccgtgtacttgtccaccagcctgtggaagcggtcggcgttcagaagcgtgtcttgccggttggcaatttcatttctgagcgtttccgactttgcctccagttccgccttttcctgctcatagccttttaccagcgtttgaaactgcctgtcggagagatgacccaaagccagttcctcgaaagaacagcggaacagcgtttccaagtctttcagccgccgttctcccttgtccaatccctgctgtttggcggctagttcctttttggcccggctctgatggctgctggtgaggcgctggaacaattcaccccaatgctccctcgcttcggcagacacccgctggatctcgctgagtacaatctgccgccgcaaggccgccgctttaatggtgtagggcgtacagtcttgccacacacgaaggtatatcggctttcgtcccagcttccgcaccggcagaaataatgccgtgagccgcagtccttgcagtagaccagcccgaagagaatatcctgccgccccagcttggtaggcctacgtttgccctgccgcacccgctggacgatttcccatgtgtccagagcaatcaaaggctcatgggtcccctcaaatcggagtatcttgtccggcgggttcagatggctctttttgctcttgaaggatggggtataggtccggcagttgatagtgttgccgatgtattcctcatgctccagaataccggccactgtactcccagaccaggcatagggcctgtccggattcaaagcggagtggcggacacttctggtgcggtaggcgtaggcggggtgaggactcgttcctgtgtgagcattctggcgatcttgtccggccccagcccgccggcgcacagctcaaagatacgggacaccacaggggcggtttgttcatccgggactagatgctttggattttcctcatccttcttgtagccgtaggaggcggaggtcccgatgcgctctccccgccgccatgatgaccgtcttcaccttcttgctggtatcacgggcgtgccactcgttgaacgagtcccgtacggcgatgctgtcatcaatgccgttgatcgtgtccacgccgtcgttgacggcgatatagcgaacatggtactgggcaaaggtttcttccagcaggatgcctaccaccagccgattccggcccaggcgggagtggtctttgacgataatggtagacacccgtcccgcctctacctctgccatcatctccaaataggccgaacggtcgaaggtgacaccggagtatccatcatccacaaaggaccggagattctgaaagccgttccattctacgtactcttttaaaatctgtttttgattgtgtatgctgttgctctttccggccagctcgtcctcctggctcaaccggcagtagagagcggtcatggtttgatttgaccgaagttccatgctgctcctttccgtgtgcggtcaaatcggttcccttggtttgtgacagcttgattatactggaaaccgaccgccgcgtccaggtgtttttaatgggcggaccggagttccttttccataagccgaatgagtttatccgtaacggcggcggcgccgctgtcccggtagtgccgggtgatctggtagaccgcgccgccgattgtcatcgttgttctgtgtaattcggttttctgttcagcagttcgattgtgttcgtcacaatggaaattgccggaagcctgcataacttccctcccttctcacaaaatggggttttcctgcttagtcatcatcatcggtgtcatagctgtcagagtcgtagttgacaaagtcaaaatcaggggaatacatctcctcgtagcttgggtctcgcctggccggagcgtgccgcttcgtgcgtttgacaatggcacggttcaactcgctcatgctggattccagcagtttcctccgtccgctggcgtaatccagtcccatttgtctggcaatacgctcgatcttctcaaccgaggtatagcggtcctgatccacaagcgtggtcgcaaaagcgagattcgcatagtaagcactggccgaaaggatggtcagccggttcagaagtgcggcgatgcggccggtctgctgtcttacagaatgggcaatttcttcacggatgatgtcccgcagcgggtcggtctgacgggcatagtcctctccgttcagccccagttccgcatagcggcgcaggagtgtggaaacgctctggtggttctgtttggcccgctcacccaggcgtccgacgagggccttgggaaagcagagtaggttccctgcggctcaatcgcgcctcctttctcccgaaaacgctgtaaggcggtttttcgggacggtttcaaaaatcatacctgtaaagtccgttgaaagcactgctttcaagcggtaattccgccgtctggtaggacggctattcctgccttaacccggaaagctccgcttttccggggataaggccctgcggggccggtattgacgatccccccgtatcataagagtggcatcctttctgcccggcaaatgaaaaagccatacacaatccgaaactgtctgttcgggccgtgtatggcttcctgtttttgatcttccgccgaactgctttgagatgtagacagggggtgcagttcagtgtgttgtccttcttcctgtcttacaaagagagtagcgcgaagaaggggatttgtcaagaggaatttccgagggggctctgcatggaaagccatttcgattttcgattatctggcaacgcttatgataatgagcgtaatttgcggtctgggacaatgcagatggtgaaatatgcaatagaacggcatcggcagttaatctatatttacccagacacagcaaatgcagctgatttttttcaaatataaacgatattcactattgagatttaagtagagtttattatctgcgctaaccataacaaaaattcccccgcttataaaacccaaccttgatctaaccgactgtctgccatacttcaattacgatgttaaacatcgaatcaattttatggaggttattttatgaaactcaaaactatggtaagcggactgttggcggttagtgtcctgactgttggatctataccggcatttgccacaagcaatatataataggttgagttggtaaattgatttactatcgtaagcgcaaaataacaatagcgccagcctacatctcgggttggcgctgttgccattagtttaggccagatatattcagcttcgtatctggaagccaaattcgctccagttcaatagctgcaaaaaaagcctgggtcagggaaataaagtgctgggccggcttggagagataccggtggcggttggtgagcaatgtaatttcccgcttgataaagtccccgttgagaagcagggggaaagcgtgcaggggcggaacgccggccggccggttgcgcagatggtcactgagaatcattcctgtggcaaagaacgcggccgttccctgaaagtacagggcgcggaatatctgtggatatgctgtgttcaaaagcacgttcggagccacccctgtctcctcatagcaggacagaatcacccgggacaaaggaattccgtccgaggggagggccaccggcagtccgggaaactccgccatggtaatcccatcctgtccggtgtggagcaggtcctccgcccggtccggagcatacgtccggagcaggccgtccgacatgcacaggtacaggccgtctgtcagcagatgggtcgcctgcagctccggattctgggactgaaacacccccacgcagaaatccatagcgttgtccgccagctgccgctcctgcaggtaagagggccggtcggagatccggacgctgacgccgggataggttttggtaaagtcccgcagaatctctgggatgaaaatggcggcccggggcgtagagattccgatgtgcagccgcccggaatcctcgtccgccaccgccttcagcacagagagtatgttgctctccgaggccaccgcctccttggcgtaggccaaaaacagctctccctcataggtgagctgcactttcggcttccgctgaaacagcttgcagccgcatttggattccagccgcgcgatgtggctgctgagattctgttgggagaggaacagacggttggcggtctgtgtaaagtttaaatccttggcagcctcagtgaaatagtacaagctgatcgtatccaaccgcaacacttcctttccgtgaggccgtccctttggtcaaaataaaacaaatagggaccagaccacaaaaaatttttgggggacctccaaattatctatgttttacattttaccacattttttgtattttaaatatagtaaaaaccacacattttgtgccatcttatggagggaaactgcacatgaaaattatggattgcactttgcgggacggagccaacgtggtaggaaacggcttctccccggagctgaccaagatgatgattgaagggctgttgcgcagcaacatccgcatcattgagatgggaaacgccaagggcctgggcgccaccgagaagggctcccccgcccccatcagcgacgtggcctacctggacctgatccacccctatctgggccaggcggagatcggcatgttcttaaacgccaagcggtttgaggcggacaatgtggccatggccgcggacaagggcatctccttcctgcgcctgggcgcggacgcgggggacggagcctccacctatgaaaaggccgctgtcatcaagcaacacggcatcaaggtgcgctactctttgatgaaggcctatctgctcacccccgaggagctggccgaggaggccgccggactggaggcccatggggtagacgaggtcaccatcatggactccgccggcactatgcaccccgctgacgccggagcgtacgtcgaggctctgaaagcccgggttaagattcctgtgggcttccactgccacagcaacctgggtctcagcgccgccaacgccctggctgcggcggagcacggggcggacatcctggactgcggcctgctgggcatggcccgcagcgccggcaatatgcccaccgagctggcggtggccctgatgcaccagcaggggaaggccctggacgtggacctgtacaagctgctggagtttgaggatcaggagctgattcccgccatggagaaggagggctatcacgcccccctgaagcccaaggacctgattctgggctatagcggtgcccactcctcctttatgaggaccttcaaagccgtggcccaggactgcggcgtggacctgtaccacttgattgtggaaacctctaaggtggaccgcaagtccccctcggaagatctgatgcgccaggtggccgcacagatcaaggaggtgaagtaaccgtgaaaatcgcactggctggtccttatcccgtcggaactcttgaacaattccaggaactccttccagcgcaggaattcttctccgttgcgacgcaggaggagtatgaggccctcgccgacgtggactgtgtggtggtccgggttctgaaaacaccggagtctgttctggccaacaagcccagtctgaaggcggtcatccgctggggcgccggatatgattcggtcgacatccaggccgccggccgccgggggattcccgtcctcaacaccccgggtgtcaatgcctatacggtggccgagctggccctgggcatgatgatcaccctgaaccgcaaggtcttgggctactggagcaacgtccagcggggcaattgggaccggggcgcgtttacctccctgtccctgaaccacaagaccgtgggcatcgtgggcggcggaaacatcggccgccggatggccgctctggttcaggcgctgggcgcccaggtgatttacttcgacgccttccgtctggctccggagcgggagcaggccctgtgtatgacctacgctcctctggaggagctggtggaaaaggccgacctgatctccctccacgtccccctgctggacagcactcgccatatcatcggcgcggagcagctcgcccgcatgaagcctgatgcctgtctcattaacaccgcccgcggcggtctggtggacgatgccgcactacttcaagcgctccgagcgggacagctggctggcgcgggtcttgattgcgtagaggacgagaattcttcagttacccaagggcttatgacagcccctaacgttctgatcaccccgcacattgggggatccaccacggatttggccgatgcgatgattcccgccgtcgcggcctctattcagagcgtttttgaaggaaaagatgtaaaaaatgttgtaaataaagcatatttgcccgcgaactgatttagaaagccggttccgatgataagtaatatacgttgcacctctctttaaggcggcggtaaaacaattggtcgaatgcagccgggatgacgagtgtgtcccgatgggggaattgcaggatggtttatgaagatatctataaaatttttccggaaatacatgagataaaggacaaggtattgcagcaaaagagcgctgacgcgctgatatctgcgatggaaatcgggggatgggatggagagagcgtttatctggctcccgttactatgaattggcagggatgtacctgcagcttagttgagcatattcgtttggttactcgtatgtgcatggatgactacaagcatttaaagaagttttatcaagcaaatggcgttgaatttgaatgggatattatagtttgtggcgcactgcttcatgatttggggaaatttacagggtttgtgagacgaaatggcgtgataatgcatggtgaagacgctaatttgctgcgccatcccttatctggtgcaattttggctgcgaaagccggactgccggacaaaattattcacctaattgcaacgcattcctttgagggagagcgctcctatcaaactgcggaatcggcatttgtcagggcaattgatgactttgtatttaaatgcacagtctacggcctgaagcagggaccggttggttgatccgcgaattcttgggacatccgtataagaatatgttgtgatatttgaaaggagaaaaaggaaatgacaatcgacagctttaaattccgctacatcaacgcacagtgctatgaatttattttgcccaacggaaagcatttgattacggacccgtatattacccccacaaacctggttggattcaggccctttcatgtcgacgaaattgagcagtgcgactatatactattgacccacacccattatgatcacacctctgacatcgggaacctctacaaaaagttcgactgcaaggtgttctgcagcggcatggtggcttctgagctggctaagtattttcaggtagcgccgggcagaatttatccttttgaaaatatggatacgtatgaaatggaagacttttccctcatgacggttcgtggaaagcatttccccatgctgaatatcagttttgagccgggaagctttcccgacagcttcggcggcccgaagcacgatgaactaaactttatcggcacaatcttctcctatgatttctgcctgacctttaagaacaacatacggatcatgtttgtcagcggcttggacgagatgaataatatttatcaggtggcacatgatttcaaacccaatgttctgttccgacatacggctggaagtgtttctgcgaaagattgggcgaaaacgattgcccgctacaacacgcaggttgcgttcccgaaccatcaagacaatctctacaacgggaaatggagtaagagtatggatgaattttcatcagaaatccaggccgaattgaagaatttgggcagcataacacagttcattaatccagagccctacaagtggtacacgattttgatgggaatttccaaggaagattgatttttggagatacggaggaggccgacaatgaatcagctcatcatttcgataattatattcgtaattacagttattttgttcttttcaggaaaattctcactgggcctgattggcctgtgtgctgcggttgcactgcagctgacaggcgtgctggacgccgcaaccgtgtggaacaactttaccaacgaaagtgtggttatgtttgtttctctgtttgtcctgtctgccggcctcatgaagaccagattgatttcaaacttcgttgaaaaactagctaagctgcagggaaatgaacggaaagtcctgtggggctgtctgataatcaccatgctgcttgctgtgtttatgaatgctacagccgcggtggcaacgatgctccccatgattacgctgatctgtgaacgttctgaagtcaaccccaaaaaggttatcaagccttgctgtgatatggcaaacttatgggttggggccctgccacttggggtgggagcaagtacttatctgaccacgaatctgaccattcagcagatgggcgggacccaggaaatggggattttggatacgatgattcttaaactccccgtgctgattgcggtatcagtttactactttctctttgtgagaaagttcctgccgaatgacctgcccctggcaatgcgtgcagaaatgtctggttcttccaacaagcatggggaggttcagcttagtccggccaaagagaatatcgcttattttctgttctttggaacagtcgcctgtatggtggcgggaagcctgctcggatggccgatttctacgtttatgtatccggttatcggcggcattctcatggtgctgaccggtgtgctgacggcccaggaggccaccaagagcatcccgcttgaaatggtgtttttgattggcggtatgctgagcgtagccaatgcgcttggttccaccggcggagcgacactgattggtgatgctgtgtctaaggtccttggagggactaccaattcttatatcgtcctggctgtcctttttgctgtgccggccattatgacccagttcatgaacaatataccggttgcccaggcatttactccaattgcgattgcaacctgctttacggttggtgtagacccccgcttaggtgccacggcagtgggttttgcggcaactgcgtctattatgacgccgatggctgcggttgcacaatcgatggcaatggggccgggggagtataagcttatcgactatctgaagtgctcgaccattccgatgctgatttactttgtcgtgctgctgatctgggccccgctggctgcaaagctgctttggggtgtctgatacgactccgttcatcgcagacagaccggaaaagaccactccacaggcgtaaggcagatatacgtttttcgacacagagcggacattcaatgcagccagagcggccagacgcacttgctttgaacaatccaaataacgaaaacgaaaaggagagatagtatggaagcgatacagattatacaaggtatgactctcacgcaaattgcaaatctgttttgccttgttgtcctttgcgtcggtttactaagtgggcggcacccccttggtctggtagccatgaccacttgcgttctgcttgtcctcacccaagttttgaccattgaggaggcttttgctgggtttgccaaccagacggttgtcatgctttcctgcatgtatgtcctcagctccgccttcagccgcacccctttgatgacaaaaatccgcggactaatggggacgttgcagggaaaaacaggctttatcttggtcgtcggcgttttcggtgtctgttttgtcctggcccaattcctgcccagcggcgtcaccgtaccgctgatggttactttcctcgcctcgctcggtgataccgggggcgatgttacccctagccgtctgatgtttccctgtatgggcattgccagcttttgcttgggctctctgcccattggcctgggtgtgggcgcacaggcccagatcaatgcgttctatgaggggatgattacagatcccagccagctctgccagttcctggaccctgcgctgtttatgataattcccagtatcctctgcctgctcttttgcatctttgggtacaagattctgcccagaggcggcgtcgtgtcttcaaaagatacgggaaaaagcgcaattcacaccggcggtgagcctatcacggggattggagagaaaattgtctacttctgcttctttggcacagtgctttgcctggttgtattcagcatgctgggcagtgaccttgcgtacattttccccgcagtatcggtcttgattctctactttaccaaaacgatgacccttccggatattaagaaaagcctaaccggcacaattgtgttcatggtcgcaggtgtactgataatgtctgatgccatggcaaagaccgggttgggcgatgtcgttggtgagttgattcttaccttgattggaaaaaccgcctctccgtactttgccctttttgttttcggcgtttctgcaattgccatgactacctttatgtccaattttgggtccttggcggtgctcactccgctggccgtatccaccgctatttcggctggctggaatcctcttccttttgttttgatagtgaagcagctggcttggtgtgacattttactgccttccgcctcctctgccgccgccacagggcatgctgcagctggatataagctgggcgagagtttacgcttctcgataccttttgttttgcttgcagtaggaggatgtatgctctctacggttctgttcttccctattcgtagctgaatgatttgggggacacttagttttaatttattttatcaataagaaaccagcaaaacgccactaggcctcttgctggaataaaaaaattacgataaattggaatgttgttccaactcatacgctgaccaattccgtttcaatcgcaatctagtgatttcagctaaatctttctacgcaatccgtcacgaaaaatggcgatccaatttcactgacaaataataaatataatcaattctaatagcggcacttttaagaatattatgttggataaacccgttcaaatagttaaagtaaccgcttccacgctgtcatttggagatattgaaattcatccagcctaccggcaagtatttaaggcgggaaatgagattcacctgaattatggcgaatattccatgccctattgtctggcaaaaagtcctggacgggtatttacaagagatcagctctatgcgtcagcttgggacacagagcaacacttcggttctaacacagtagaaaatacgatttgccgcttgcggaacaaactggagccagaaccccggcacctgcagtatattaaaacggtaattggtactgggtataagttagtaataccagcacaaacgcctgcaaaatagttttctccgccatactcttcaaatcattcaaatggcgcgtgcgttccagaatgtcatccgttactggcataggagcgtccatcagtatttgttgggtaaacgctctacctgttctgtggcctcccgctgaacctgatacattgtttccatgagtgatccattcatttttaatgccgtatagcaatccgagtgattctcgcgcagataggagagcgccatccttccatatcgccccagcgggcagtcatcttccgcacggttggaaatttgaatgttaggcaataacattccgtcctgttcatggtaggataagttaagatttggctttttcatttcgtgtgcctccagtgatttggatttcgtcacaaatccatgaaaccaatctggttcacactctgtcaaaagtttttcttaacatccttatctgtacgtaccgaaactctgccagcccgttttgctcaacaacatatatattcgtgatagacaagttcttctgcccggttgtggatgctactcattcgctttacccattccatctcatgctctgctttgagttgttcgttcacaccctcactgcttgtcatttggctcaccaactgagaaaacatgttctccgcctgccggtcgatttcagcgaggtgggtgtccagcttcccgccgaaaagcagggcggtgtagagcgtttgccgatgcttccgtagataccgcctgcgccgcttgccccagatgccgacagagatgttccccggtacggtgagattgggaagaagatgatccccctcctcacggtaagttccgtccatctgctcaaatgtagactttttcatggaagtttcccccgaaaaattaaatttccctgcaatccaatccggctggcttaacaaatggttgtgggggacacttccttataaagtatcccccacggcacttgccccgacgtgcaagggcggttaaaccgatatttctgtcataaaggaaaaatagccgcccgcagggcggcaccaaaccagcgcccaacgaagtgagtccggtttggaagcgagaaacagcagaatgagtgcgctctgactttaaaaaagtcggagcaagcgatatggcgcttgctccgacgtggcacgcccgagaggagtcgaacctccgacctaccgcttaggagaaggctccggacgctgttcatcagaaatcatcatcgactgaaaaccattgatattactggattttttcaggtttcactcctcaataaatcccatcacattttgctaatttcggttgttttttagggtccaaattagcaagcaattagcaagcgggcgaaaaatcgcttgacggttcagcgttcaatacctctcatctttgcaacaccaaaggcaaccagttcaattcaaatgtcgccggtcttgtaggtgttgtagccctcatagcggtaactggcatccacgcctttcatataaacctcacgatcattgatttgatcggttagagcggcctttaggagcagcttgatctcggtgtccttgattgggctgcgctccatcgccaacaggtagtcgtctttgtctaccttgctccagtccacgacctgacgcagttctttcttcaagatagcgtccagccataagcgggtgctacgtccgtttccttcacgaaaaggatgggccacgttcatttcaacatactttgcgatgatctcatcaaacgtggattgcggcatcctgctgatgttttccagggccgaggtaagatagaggacagggacaaaacggaaaccgcccttggcgatgttcactgtgcgaacctgtcccgcaacgtcgtatatttcatcaaacagatatttatggatttgggaaagtccccggaacgtaccgacttcaaatgtgtccagcagaccctgctgaaacatctccagtgcttttgtcttgctgatccgttcctccgcctttgccagttcagtggattcggtgatacccagcttattctccaatgccataagcgacaccccctcgtattagcaacagattttatgtccatattataccacaaattagctttccgggcaatcaaagagcgccgaacacaactatgtaaaagcggacaggaatggtactcattcctgtccgtctctattatgcgcttcttcctgcaagggctgtcaaaagcgccgccatatccggggattctgtaaggagtttgagaagcaactgctgtttggctgctgcgtcaaggttttgaagcgggtctggtgccgggggctgctgttccacgggagactcagtcaccgctgcggtttccgctgtgctgccacccccataaaactctttctggaatcttgcggcgtttacacggcggtcatcgtctaagatatgggcataccgttccatgaccattgtggcctgtgcgtgcccggtgtcaccctgaacagctttaatgtcgccaccgctgagtttaagtttgtaggtcgtgctggtgtgcctgagactatgaaataccactttggggagattattttccgtgatgagtttgtcaaaggcccggttgatgtaatttgcttcggtaggggtcccctgggtactggcgaatacaaggtcataatctctatattcatcccccagcaattctttcagttcatcaatcgtttttctgcgctctaccagcatttccgctaccgccctgggcagaaataccttccgcacacttgtcttggttttcggctctttcagggccagtacagtggaattgcaccctcgcatcgtgggaaacttaaacatgatacctttttccccgatctgtgccagtgattccctagagatccgctgaagttctttgtcgatatagatataggcgcagtcatggtctatgctgtcctggctaatatccacacagctccatgtcaggcccagcagttcccccattcgcaaggaacaggcaaaggccaaattgatcgccagggcgaggaatgggtcatcgcagagggataacgctttcatcagtgtttgagcgtcccaaatattccgctcatgcttctcggctttgggaacggtggcattctgaacaggattccttgccatcagctcccactttaccgcctgattgaacgcattccgcaggagtttgtgtatctcccgtatcgtatttggggagataagttccccctcgggcttcccgtaccggggaactgctttcacggtttggaggtctttatagaatttagttatcattctggggctgatgtcatccagcttcacatctccgatgatgggcttgatgtagttgctgatcagcgccgtatgtccatcaaaggtagagggggcccatgtgttgacaccatagagggatacatattcgtccagaaaatcggatagggtgtcggcactgggcgggatgaacactccggtgtctagctgatgctcaatttccgcttttcgcttcttggcttccgcatgggatccgcaggtttcccatttttggcgcttggcgccattgctgtccgtataggtataaacaacggaatatttggttttacgtttgataattgacgccacggttgttcctcctttcagctggcaactatggtatggcgattttgggacttataccacgcttcaaagctgtccttataaatgcggatcttgtcattcactttcactgtgacaaacaaatctcgcttgttcaccatgttataaacgctgtttcggtgtatgcccagcagttttgccacgtcgctcaccgaaagggttgcgtccaacagctcttgcggtgccgcgtcctctcgtttcttataatgggactgtccttgataccacgtctcaaagttttcctttagaatgcgagtttgcccatcgaccttgaacgtctcaaagggtgcatggttctttatcagctcatagatggagccagggttcagcccgaggatgccagccgtctccgggacggtcagagacgcagggagtagttgtcctggttccggcccgttgacctttttgtagcggaattgactgccgtaccattcctcaaagctgtccagcatgatccgcattttgccgccgacaagaataaccttgaagcgtccctgttttacgagccaatatgcctcgacctttttcataccgagcagcctctgcatttcggggacagagatgctggtttttcccataacagatattcctcctatgtagattttgtaatagctgaagtcaaatatcgcgtggagtgggagatacaccatccagccactcatcaaaactaaccttcgagatgcgaatctgatttccaatcttatgacttcgaaagaagtcctttttaattaggatgtatgcggacgaacggctaatatccaacatagccataatgtcacccacggagtaggctcgtttttctttgatatgtactggaaccatttctgcgtttcgagcattgtgttccagtatacgctgttccataattttatcgttcatattccgttaaatacctccctatgccgacttgatgagcctgccaatgcagccaaggcacttgccttgactgcattgtaccggggagacatttttatctcaaatgtgcgattgttcagaccaacttaaaatcgtactgttgacaatcaacctttgtccaaccactcgtcaaaacttgctttagagattcggagttgttttccaatcttaaagctccgaaagaggttctttttgattagaatgtacgcagatgagcggctaatatccaacatagccataatatcgtccacggagtaggcccttttttcgctgtcaaaagcaggcgctttttctgtgttgcgggcgttgagttctgccatgcgctgctccatcaattcatcagtcatacctcgtgcctccttaatacctgtcatcgcccaggtgttttttcttgtgaatgatacggtaatcgtagccgtcccggacgtggcagtacatacaaggttctttagcttgtgcgtggttaatccgcctcacaatatgttcgggtgaacagatgaactgtctaaggcaggtgccacaaagagtcagcaccatttcgccgtgcatctcatcatgtgactcatcggcatacggcttctgttccttcccagcaagatcatgcaggccgacgctgatgccaagggcctcgtcaacatagtccatcacatcatcgtcgaagcagcctacatagctgcccagcctgctcttatcaatcgttctgatctgctccagcataaccatagagttttggggcaggccaaagtatggagggacaccgatatgggtcggctgatggagtttcttcaccctggtcgtgataggggcaatgatgatggtcgggctgtggcgatttcctatgttgttctggatcacaaggacggggcggttgccaccctgttcagagccaatcaccggatctaaatcagcatagtacatctggccgcgcagcacttcatctggcagttctctattcataaggacacctcacctttatgtgatttgcccttgcagccaaatacccaactacttcccaggtagtgtgcaaaacacatctgaccaccaatccattcagagtctcttattatcatagctggcgattggccgtctccgtgttggcggtcagatatgtaatgcacactatttgtcctcgacaccccgtgtgcaggctgaagcctgggaagtcgtcaagcggtggcctgctcaccacctcacgggagtttcaccccaactgtcgttctgacagagccgcccccattgtttgagactgtggctgggcgggagtaccattgtcattccgactgtcattgccattccgggggcaacccggcacttacaaagggagttctcgctcatcccggaaaaactggatgttttcgcagaccttattttcaacaggtcatgatttccagcagtccgggcctcgtggcgtaccctgttgtggtagctcatgctttcacacatcggaactgatgtacttgacgaatgggtattcggttatcaaggagcattgaggggcctgcggccctctcacccccctactacaactttcaacgcctcaaaccgaacttatttttttaaaaaatctaagacaaatttttcaaaggccgttttcctcttttgaacagctcgatcactaagtttgtacctctcgcacagaccgtttgtgcaggagcgtttcgcaccagacaaatagagttccagcaagtcctctgcccagggcttccatttacgcagggctgtcttcagttcttcaatcagaaggtggtcagtagcaagcccttcgagatcaaaggccgaggggacgctttcgtgtagcgattcaagtccggcttctggcacaccggcgtccaaggataaaactgagtagattgaaccagctttgcgcttccgctgggcaactgtgtttttgctgttccactcccggtattcgactgcggtcatttcgatatacatacaatccagttcatccccatccgcaaaacagtcttttatgaagtaccgacgccgctcggcgggcaatccccggttttctttcaaaatagcatcccattctgccggtgttgccacgacgagccgacggacaccattcacctgtctataaactaaatatgtagttttcatttgtgatctccttgaatttttgaaagtcaaaaattcaaggagatcacggatagcggcagagcgccgcctgccaagcaaacagatccattccctactccatttctggagcggcaacaaaaaatggccgggcattaggaaatagaggggtacgtcccctcacattcctaatgtccggccatttggtgactatctaccttacggtacgatgacccgttgctcggtacacttagaccttattctgttgtcacttcccgcttcgtgtttaatatccgaaactaccctgccttccggtataatatcttccggcgcagggccagatcgacctccacgaccctatgacatcgggggcacttgatctcaatttttcctgtagtaggtgatatcttatccatcacgcgccaattacatttagggcacctcacggcaacattgataggttgggccatcagttatcatcctccatttcaatatcggccagcgcataggggttctgcaaataatcctttttcagcaggccaagtcttttcagtctgatggacatagcctgtttggaaacaccaaggaactgtgtcattttgcagaatagttcatattcctttggccggtatattttattcaatatatcaataccgcactctaagttaaatttttggatcgccccaagtacgatctcagaggggagcaggagagcagacgctaaattatcagcttgccactcatcccaatcgcggattggaaattgcggactacgcccctgataatagacaacacgattttgaagcaatctattagtcgaatataagctggctaaaatctggtgggctgtttcgtgcgccaaagtaaagtgatatcttccgcacagagctggattcttctttaagtcagtttctattaggagagttcttccatcaaggtagtagaagcagggctgtccactatcatcgtagagttcaacgccgacctccttaaatgcggtcattccgagggtcagcccgtcttttgatagatggaaatagtcaatgtggaggccacaaagctcacatgcgaggatttcagggtcaacacgatcaacttgccggtctacaaactgaggtaaatgcttgtagtcattgaaaacctgggttgctattttttcaatgtcacttcgggataaataactcatcatttgtacccttattttcataaaaacgaatttcgacaaaaagaaataataatcttgacacgatgtgcaactcgttgtactatatgcgcaggtcaagttcatattccatattataggcaatttgactgcatatgtcaatataaaatatgtaattagttgcacattagttggaggtagtataatgaagtttgctgaaaaagtacgagccgcaagactcaatataggctatacgcagaagcagcttgcggaaataactcatgttgcgctccgtactatcgtcagctatgaaaaaggggaaagttacccccggaaaagagaaacctacgcagcccttgcaaatgccctcaatgttgaaacaaactacctcttgacagaagatgaagaatttgtggtcaatgccgctgaacgatatggcgctcacggagcatcacaggcccaagctgtgattgatggattttccggcctgtgtgctggcggcactttgtccgaagaagataaagatgctgtgatgaaagcgttacaggacatttattgggagtcaaaagcaaggaacgtgcaaaaatacacaccaaaaaaatttaaaaaatcctgattatgggacagtgacccatatatgatttgtgatgcaaggaaacctttgtgcttttgggggtggaacgtctatgctgcaaaaggcagaaacgatctatcataaagcgaatgaacttgtaaggcgctgtggaacgcgggataccctgcgaatcgccggtaagatcggcatttatatacaccaaattgatacttttaaggagttgctgggaatgtatagttaccagcataaggagagacatattctgctgaactccaacatggattacattacagttcaaatggtctgtggacatgagatcggtcatgatatttttcatagggagaaagccaagagcagaatggggctccaggaattcaccctgtttgatatgcggagcgagatggagtatgaggccaatgcctttgcagcccacttgcgtatcgacagtgaggaattgcttgagcttgcaggtcgcgggtatgatgtggttcagctttcctcaataatgggaacaaatgttaatttggtgctcatcaagttaaatgaactcaaccgtatggggcttcgacttgacctgccatatgttccccgttctgattttctaaaaaatgtaacagtataaaatagaaatcgtcctctacaaagtagggggcgatttctataactcattacaatctaattggaaactccagcttgattaggtcttagttgtttattgacatttcctcattctgcactattattaagaaaagcaataatgcaagacggtcgtgtgtcacgagaacaatatgtatcatctaaaaagttggatatgggacaggaggcggataccaattgagctatatatcggcatttaattcatcagaagacaaaaagaggaatttagcctctaagatatatgatatcagcgaaagcgtcacaaaattcttctgggatgacgcaccccggcttggcattcagcaacgagagggacagcaggacatggccttcgacgtgctggacgcgatcaaaagcggcagtcatgttgtgatcgaggctggcgttgggataggaaaaagttttgcctatctggtgcccattctgctttacaatgccaaaaccttttctccagtcgtaatcgcaacgtcaaccattgccttgcaggagcagcttctgagcgatgtggagcggctgaagaaatggctgcgcattgaaccagacctcattttggcgaaggggaagaaccactatctttgtctccgacgcgcgagtgagtatttccagtctgttgacggtagtgctcaggcccaaatcataagtgacatccgagccggccatcaggaccggcgttcctttacacagcatattcctgacgcagtctgggataagatcaatatcacccgcttcagcaaatcagagtgcgctacctgtaagtatgccgacgattgccaatattacaatatgcgtattgccctacgctatacccgcggagtcatcgtctgcaaccaggatctcctgtccgcacacctgctcctccggaatcaggggcaagatgggctgttaaacaatgaagtcaagctggtcgttatagatgaggcacatcacctggaggaaaaggtgcggagcgccactaccactcaatgttggcagaggcagatcattaaaaccatctatgcagctgagaaagcgatttggcccacagagcgacaatatgttgccggaaaaatttccagcacagtgcatgatataaaagccctgtaccgacatctgagcgatcaaatgcagcaacagatcgacggtgcggaccgcactgtacgcgattccgaacgtctcttcttgcgggagcacgtacatactgccgcgttggtccaaaaagcatctcagtcattggtggagctctctgacagcattcagatctatgccgacatgagccgccgaaaccgtaacagagcggccatcgatgatctggcgattcttgtggattcgttttacgtccttgcctcctcctgggatgagcagctcgtgtggctggagcgcagaggcccatatacgcagctgacatggtgcccaaaggataccagcaccatcatcaacaacctgtttttcagcgcctcgatacagacgatcctgacctcggctaccctgactaacacgcaggacggtgagctagaagagcaatactcctactttgttcggagtaccggctttccattaggagatgccggaatgcttgcggagccaaagccctccccctatctttacgatgagcatgccctcatttactactgcaatgacctgccccatcccaccaaagagcgcgaggagttcatccaacagggggtggagcgcctgatccggcttctggagatctctcatggcatggcgctggtgctttttactgcaaagactgatatggaggatgtctatgcagcgcttcaaggccgtgaccttccttataagattctgattcaacaaagtggtgcctcccaagaaaaagttctgagagagttcagagaggacgcaaattccgtactcctgggcaccggcgcttactgggaggggatcagtatcgaaggtaaaagcctctcccatgtgataattttccgcctaccctttcctgtacccgatccggtcattgactataaggcgtcgattgcgaatgatcccctgatggaggtcagcgtgccggagatgatcatccatctcaagcagggtatcggccgcctgatccgtaatgagacggataccggcattatctccatcatcgaccggcgtctccgagatgacccaccggaacggtaccatgatatcgtctgggatgctctgccgatccacaacaggaccatggaccttcaacgtgccaggcaattttacgaaaaagtttgtaaggcataaattccgagagtatttctttgcatgtgcagctaagcagtttttatttaatgaatctcgaaaatctcctaatctataatcctatcataacaagaactggaggcgggcaatttttgctcgccttcactcaattctttcttgtttgacggttacaagggttctgcctaaaactgctttctacttaaagataaaaccttttgggaaccacacacatagcgcatagttttcaatctacaacaaaagtaagcggcaagtaagacattccaacctgccgctcactttctctcaaactttaacgatatgcaactataattgccctgtatgtattagcattaattagctttacgtttggctgtccgtggaatgttgtattaagtacagtataatagcaaggccaatacagcaaatccacgatgcatatccccctaactttaatgtagcgatccctcccaacccagcaccgatggggaatgaaaacactgcagctgcataacggaataatttggtgactgcacttttttctcgcgttataactgctgtacaaaggtactgcccgactgttcgtaggtttccggtacagatagttgtgttatgtactgttccttcacaagagcggaaattacttagttgaaaacccgcatttacagaaaggaaccaattgattaagatattaggaagtgaaaccggcaaaaaaccgatgataaatagagcaattatctcggaagaaattgaaactttttgccatatcaaaggatgccttgtggtacaagaacgtctgagcaattccgcaagaaatgcccctacaatgtttcctgagatagggatcaggaccattaatgcctccgaccactgtccttgaaagactgatatccccatttttgccatattcccagtatgtagtgaagtaaatgaaccatgcgtatagaagctgtatgcattcaaatatccaccaacagctgttaatatagagataaagagcaatgtttcttggaccgggatgtttctgggcttatgcaatacctcatccccttaccatgtagctacacatccatctgcgcgcggttcggttgccccggctagtgttccgaattctgttcttagaatcatatcacctcgtccaaagggagcccgctgtacagaataagaaattttatgtcccatctcttgcaatgcagttacgatatgatagggaaccccatgttcaacaatgacttcctttccttttttccacatccatcgaggcatatcaagcgctgattggggattcatatttcggtctatcaggttgaccattacttgcacatggccttggggttgcattgcgccgcccataacaccaaatggccccacaggttgtccatctttcatcaaaaagccagggataatagtatggaatgtcttttttcctcctgcaaggaagttgacatgaccttgattgagagaaaaaccacacccacggttttgcagagaaattcctgtccccgggattacaataccagaaccaaatcccttaaagtttgactgaatgaacgagaccatatttccctcggcgtcagcagtacaaaggtaaacagtccctccatcttttggattttcagcgacaggaaaaatggctttgttgccaatcgactgcctgcggcgagccgcaaaagctggggaaagtaattcttcaacggataccttcatataatttgaatcggtaacatgctgatgagcatctacaactgccagtttgatcgcttctatgctttgatgccagctcatggggtcctctgttgacgctacgtttagcccatctagtatattcaaggccatcagagcaataattccctgtccatttgggggaatctcacatacctcataaccatgatagtttacagaaatcggattgacccactcaacttcaaactggtccaaatcttctttcctaagccatccccccatctctctcatggaacaatccattcggtccgctaacgagccgtggtaaaaagactctgccccagtttctgcaatttcctgaagagtatcggcatgatctggcaggaaccaaatttctcctgcgcggggtgcacacccatcttttgtaaaaactttaaaccattcatcaaactctggattccctctgaagggcgcaaaggtggaaacaccagcatctttccacagttcgcttactgttgctgaaactacgaatccttcccttgcatatctaattgctggctcaaacagctcacgaaagggtaatttcccaaatcgctcgctcattgcacgccaagcgccaggggcaccgggaacagttacagatgcaagccctcgttccggcatttctgagtaacttttccgggccatttcttctggggttaatttaagaggagattttccagacgcgtttaggccgtgtaattttccctgtgtccacaccaaagcaaacgcatcgcttccaattccgttggaggttggttgcacgattgtcagacagatagcagttgcaatagccgcatcaattgcatttcctcctcttttcaggatttctaggccggcctgtgcagccagagactgagaggtgctgaccattccgcgatgtccaaatgcaaccatgcggcgggaggggtagggataagaatggtagttcatatatgttctcctttgaaagattctgcagaactgaagataatcgtgagtatgacttgcccttgtcggtgccaattattatgatgcacgtatttccactataactatttacgttctgttagacgcaagcgaataatccgtttgggcctgccagggttctgagacgattcttttccaacgacaacagcatatccggcatctatgagcctctgtaaaaatcggttcatagaacgtagagtgaagccgcatagccgcgctaactccgaaggtgttgtttcattcagatcgaactgccgctgtacatgatcaatcagactgagtgtatcaattccaatggatgttttttgagaaatcaaatacagatttcggtctaacaatgggatttgactgtcagacgagttttctgtaatcgggccaatcatttgtccattttcatatatgacaaaacctgcgcttccgtaacgagcagcttttttgagcccgatctcagcattgcgttttgcctgtgacggagtagcccccaatccaatcccgatggaaattgatgcactttgatcgattgcctgtagctttgtaagaacagggatattcttgaagttatgtgtctcgcgggcaatctggagttgtgttgtaaagagataataggtctgcgatttatcaacgagagcggcattaagttgacctgccattgtatatataatttctctgcttcgattttcctgctgcagaagctgaagctcacttcttgaattcagtgaatgttcccgtagaaaagatgttgcgacaataacaactgcgattcgatattcctccgtgggacctgtctcatgaaccaaccgcagttgactgacccgatccatgatagattcagtatttatggcgcaccttactactggaatatttctttcctttaggatatgctctactgtaaaatttccggtcagacataaggatatcttgtttgacaggtaaagatcactgtgaaattcagcaacttttttgcagtaattaggttcagatacattgattgggcaggaatagatatggatttcttcccttgaaaatccaatttcatcatagacctgtaatagtgtgttatcgaaaaagccgtcctcactgatcttgcgaatatcataattattgagataacctgctcttaacaacgcacataatgtggaaatcatatttctaggaagatactcccaaggcttttcaggattgacataatagcaagcatattgaaatggtgtctgccctgtaaatagtaggccatcaacaatgggttgatacttgcgtacaatctgaggcacttcgctcaaatcctgatacggggccccaatacactcaataaaaggctcctttttctgtaccactgccactacacgtgaggtgctgacctcagggcctacgattgcaatcttcatagtggatttcctacactccggcttattttcaacaagtggatagacctatactcttaaatgtaacattgttaaaatccaatagcggcccccaccaagatggcagctgaggtgataacaaaccacatcaggaagagaggaaatacccatttgacccattttgtatagggaattttccccattccaattgcggcaaccaggctagctgcagtcggaacaataatgttggacataccatcaccatactggtacgcactcacgaccaactgacggctcaagtctagaacatctgccatgggagcaaagagcggcaccacgacagcagctaagcccgatccagaggtgataataaagttaaatccagtgaccacataatacattaagagagcagacaggctattgcctacatgagagagggggatcgttgcggcatggacaatggtatgaattatttgtccctcttccagaatgactgtgatggccgtggcgagaccaatgataacaccagccgagaggagctgcttgcaccccttgacatactcgctggcaatcttctcaggagacatttttgataacagaccgctaacaagcgcaataaggaacaaaatagacaccagatgatagttagaataatcccaagccatagttccgtaagcaaaccatgcacagccaatcagcagaaggaaaagaatgatgtaatcggtcttagaacagggttttccgctttcttctgcgatctccccatcccattcgattttttgcaggaggctattggccggattggactgaaccctttttgcatataaagttgtataaattaatgtggcgccaacaatcaatcccataacaataaatcgaaaggcagcacccgacatcggcggaagaccagctaaatcttgtgcgaccagaactgtactggcatttaaaggagaagagccaaaaccggcatagttagccaaataagtcattgctacgccaacaatgggatctaacttaagttttcgtgctaccaacagtccaagtggcacaaacgctacacttgcatttcctaccgccaaaaggccgcctaccatcgacatcatcagtccaataataggtacgaccgctagagaattccctcccatttttcgaaccagacggtcaagcgcccggtctagagcgccggttgctaaaataactccaaatgcgccaccggacagcactaccaagaaaatagtcttgttattttcagtcataccgttggggatagacaataggaaatccataaatgagaccggctcatcatcgacaatataatggaacgaattcgggtccatgacctccttgccgcttacagcatctacgacattttcataagtacctgaaggaataataaaggtcaacagccagacgaacactaagatatagaaaatcaaaacatatgaacctggcatcttgaatttctttttcttttccatgttatatctcctcctccattttatgatgctgtggctagtccaaactccgcatttaatatctatcgcaagatagtgcgggagaagactccttttacttacaaatccaagccccccttcttgtatggattctacaaaaaataagaggtgctgtatattagccattagtgttttcaacagacacgagttaaaatatattatatgcacaaaatataaagtgatacttttgacgaaatacactaaagtcaagccaaaaattcaataaattcccaatctgtaatttaagacaattaaagtcacggttttattgtaagtagggcgcgtaatatttggcgacttgcttttattgctattgcgcaatgtcgattttcagtcactttaaaagaatcgccataaatttaataaatcgaggaacgactggaccaatcccagccgttcttcttattaatttgactgattaaaatggaaattcaccggcggtacataaatatggtgatcaaagtgaaccatttatattccgctttgatgcccagagtggcttataccctattctttatactctaacgatggtcaatggagtcgaatcatccagttctgccaggtagcgcagaccggcgttcctcggaaggcatggacttcatgcatgccgctacagaaaatacagggcacctcctgttcatatttctgtatgatagtcttgtccccatccgccagaaattcaatggagcggccagaggatatttccatctcctttcgcatttggatgggaatacacacccggccgttgtcatccttcatttcgttctctccctctgtcttttggggtggcacttgtgtagtcaggaggtagggacactcaccatctccgggacgttttccaggtccagtaccacatacccatctgctctgaaaagacctgatccaggtggtgtcccagtgccttccctacatcggctaccccagaatcctgaacgccgtggcctgcgtgaacaaggcggcggagaactgatccgaggcgccttcctggctctccctagcgcgggcgtcggcagcgaaacggtaaccaatcaatgaagaaaggcacggctggaagaaaacttccagccgtgcctttctttttctgcaatgctgttttcgtgtaactgcctacgtgttaacgctttgggcggagggagggagtgctgcggcggccgcggagcagaagccggggagaatcaggccgcagacggttcagcccagcagctccttgactttggcagccactgccttgcccagtttagcgtggtccttccgggagtagtgaataccgtccaggtcgttgatctggaagtccatttctccgcagtccaggaaggcgcagccgtaccgctgggccacgtcccggtacagcgcaccccactgcatgctcttttcataggccagcggcccatagctgaagccgaaaatcatgtctgcgatgttttcccggaccggggcgggggcaatgagcagcactttgggcactgggtagttgtaataggaagtctgagccgcggccaccagcttctccacgccaaaggagatcatgccggcggtgagattgaacatatgcttcagctcattcacccccatctggatgatgaccagatccagaggggcgtgagcgtccagagcggtctccaggctggccagtcccagccggtgggggaaatagggatcctccaccatattggtgcgagcattcagggcgtcttcaatgattcggtagtctgctcccagcatgttctgtacaattccgggccaccgctcatcaaagggaagccgctggccggagccaagagccgggtcataagtggtaaaatcatagccccaggtgttggaatcgccaaagcagaggatgtttttcatgataacgctcctttccaaattttcatgatttatgtatgttgcatcgtttcgtgaatccagcgggccccgtgcaggaaagccgtagccattccccctgaatccgctgccggaataaccaagtcggcggcggcccgcaccttctccggtgcgttggccgggacgtaggcaacgccggcctgttttagcatgggcaaatcgctcattccatcgccggcgcacagacactgggagagggggatttccagccgttcggccagctctgccatggcgcgggccttgccggtctccccggacaccacgtccacaaagtgacggctggagaaggtgaagcagcacagctctggcgggaaacaccgccggcagttctccagctcctcccggttttccccgcagaggacaagctttagaatcggaatcggaagagccgacaaggggacttcggggccctggttttctacccgtacccccttggcgttcagcagggcgttgcgtcggagcacaaaactgccctgctcggtcagcacttggagactgagatggggaaactcccgcagaaaccgttccatacagtctaaaatatggggagagaagggaacagaccatagaaaacggtctgccgagaaatcgtacagggccgctcctccatagagaacacagggggtgtctacgctcagtgactccgccacagggcgggctccctccacacttcggccggtacacagggagagcaggccgcctgccgcccggaaaacatcggcggcctggaccacctccggggcgggcagaacatcgccgcgaaccaaagtaccgtcaatgtccgacaaaaacacagaccgatccatatgacctccttcggaaataaagaaagggggcacgctgtgacagtgccccctttgcttcgttgaacggttcgctcagcgaatgctgtgtactttgtccataaatgccttgacccggtccagttccacatgattgtcaaacagaccgtccttcttgaaggtggtgcctacaacggcaccgtcggcaatgctcagaatcttttcgattgtctccagcctgcagccggtgttggcaaagacggcggtggtgggaatcgcattcttcacccgggccagcacgtcggcatccgtggcggcgcccgcagtaatgcccgagacgcaaatcacgtcgggcttgttgttgaacacggtggtcttggcaatctgctcaatgggacgatcggccagatacttggccgcttcgggcacaatgttccacagcagttttacattcttcaggcccagcttcatctggtggcggacgatggcgccggggtcggtatcccacaggccgtagtcagaggcataaacgccggacatgatttcacggataaactttgcgccggtggcggcagccagatccagagaggcatagggatcccacagcatattgacgccgaaggggatgttgatctcgctcttgagttcgccgatgacccgggccatgcagacggtggtcacggtctccaccttggtcagatagggcaggctgaattcgttggaaaacatcacggcatccacgccgccctcctgcagggcaaggaactcctggcgggccatatccaccaccttttccatgccgccgtcggcatcaaaataggggtcaccaggcagggcccgaacatgacacatggcgataatgggcttgtgagtgccgaaggtttctttgatccagtccatctgtaactcctcctaatcctgatttcttttgaggttttttgcgccggaatgaaacgcgccgcagctccgccctgagccaaccggggaactgcatcgctcaggctattctcgttccaaaaatatatcataagcgttcgggcatgtcaaccaaaaaaacgattgaagatgaataattttgatttatatcgcgcttgacaaaatcaaaaaaggttaaaatactcaaaaacaagaaaaaatgagcgttctttattgacatgtatatgcacaatctgctatactgcggtaaaaagtcccgcgggcaagcggaacgaaagaagggggcaggacaagatgagcaagcacattgggtttatcggtctgggcaatatgggccggggaatgtgcagaaatttgattcgtgcgggccatacgctgactgtgtttgacaccagcgaagccgcggcggaggccttccgcggacaggcggagattgccggttccgtggcgcaggttgggcagaacagcgacgtcctttttctctcgctacccaattccaacattgtggagtcggtggtagctcagcttttggagacagggttggaagggaagattctactggatacttccaccagctaccccctctccacccaaaagctggctcagcaggtaaaagaggcaggcggattcatgctggatgcgcccatgctggccggcccagaggaggcagaatccggggatctgctggcggttgtgggaggagaagaggagatttaccagcaggtgggcgatctgctggatgccattacccacgccaagcggtacatgggccccagcggaaacgggcacctgatgaagctggcggtaaactactgctccctctctcaggcggcgatgtttgcccaggtctacccggtgatgaagcgtttcggcctggatgagaaaacggtgtacgacggtctgaacaatgagatttttgacaactgggttttccagttttacagcaagcgctatgtcagccacgattattggtgcggcttctccctaaacaacggaattaaagacctgggctatatgaagcgcctgtttgaggagtgcaacgtacccggttttgtgctggatggcgctctggatctggcgcgggtcacactgggggaccagacccccgagcaccccctggaatttgcagatatgggacggaccatgtatcggctttttgggtttgaagagaaaaatgatcgaaaacgattgaattgatcgttttatgtgggtcataagttccatgtgagcagatgaaataagcataaaaaacaaaatcacgcattctccattgacttcctagagagaatctagtaatatatcactaatagtacaatgaccagaggcggtcttttgtacaaaaacacatccaaaaaacagtaggaggaaagaacatgaaaaagctattggcatcccttctggcaggcgcgatggccctcagccttgtggcctgcggcggcggcagcagctccgcccccggcagcgcgtccggtgctgagcctgccagctctggaggcaacacctctcaggccgacagctctggtgacggcgagctgcgcacggtcaagatgtgtctggcacgttccgccgaggtactggaggatacgcccttctgggtagctgagaacctggggtatatggcggaggaaggcctgaagctggagatgatcgagaccttcggcaccaccgactgcaagatggtggccaccggtcaggcggacttcgccgtccccggtccctccctggcgctgcagtcgatcgagcagggcctgcctatcaaggttgtctgcgcctatgacgccatcaacatctggggcctgtgtgttcctactgatagcccctatcagacctttgaggacatgcaggacgccgtctccaagtacggccgcaagctgaccgtggccctgggtgacgcctcctgggagtccctggttacccccactctggtggctgccggcattgatcccgccgaggatctggagttcgtggtggctggcgaccagcgctatgtgcaggtggccgagggcaccctggacatcctgttcacctggcccggcgaggcttatcagctcatgggtcagggctatgacttcaagtacatcgacggcaacgaagttctgaagacctgctccggcggcatcatcaccagcctggacatgatcgagaacgagcccgaagtgatcgagggctttgtccgcgctctgtgcaagggcatctacttcactaagtacaaccccgaagccgctgccgctgtctcctgtgatcagtggcccaacatcgacgtgacctgggagactgccgttgccgtgcaggaaggccgcaactatcagatgttcggccccgagggcggcgaagaggagcagaagctgctggagaatatcggtatctcctgggaggacaagtggaagctgaacgtggactccatgctggaaactggcatcatctccaccgacatccccgtggaagacatcttcaccaacgaatttgtggacttgacttgggaccgctctcaggtcgaggccgatgcagacgcctacgattggcaggccactgccgcccgctacgaggccggctgagccgaaatatccggcaagacggagcaagcgaaaacagcggggtcctgacacgacctcgctgtttttcaaaacaggacacccgctcacgtaaagaggacattcaatgaaatccattctttcattttttctgtgcaccatgctcgtgtgcccgctcctttccgcatgccagggaagcgggaacaccgggactccatccgaatctgacacagatcagtcagtctctgccggcgatccgtccgctcccgccgccgacgaagtggtggcccgggtgggggacaccgagattctgtatagccagctggctgaacagatggtaatgttggaagcaatgtatagtggtctgtcggagcagttcacaccggaacagctgcatgaaaagcttcatgatgcagctttgagcagtctggagacgcttatttcccaacagatcctaaactcaaaaatagatgaatacggcctgaccctcactccggaggaacagcaggaggccggccaggcatgggatcagacgatagaaaacgtcacaaatatggtcaggcaagactatcccgacctgacgggggcggatttggacgcaatggtccaggcgacccttgaggtcagcgggcaggagaaacagactgtggtggataacgcggctcgatcgattctggtgcggaagctgaaggaacaggtcatgtctgaaacgccgcgtcccaatcggcagaaggtggagaagttctactccagtctgttggcggagcagagagagcagtttgaccaagacgtcacgcaatttgagtcggcgatgattatgggagaaccggtggtctatgtgccgcaggactatcgggtcatccaggagattcatctgaagtttgacgacgaggtggtgcagctgctgaaccaaatggagcagtatgataccgatgacagcaattcctatgaggaaatgctgtcgctggagtatcagcggctgcaggaggaatcgatctccaagctgtatcatcagctggaagagggcgttgcgttttcccagctgatggaggatacaaaaccgggcagcagcaatacctttaattatgtctgcgaggacaccacccgtctttcccaggcgtatcagcaggcggcgctgtccatctcccggccgggggagacatacgatacccccattcagcaaagccggggttatacgattctccactgggcggacagcctggaggcaggggagatcccgctggaagaggtgtacgacctgctggagcagcagctgctggaggaggaccggaatcagacctggaccgatctccagagccagtggcggcaggagactctggtggagatttttgaggaccggctgggctactgacctcgggaggggcaaaatgaaaaaaactggtatcttttttgactttgacggtacgctgttttacggcaccaccgacatcaattactacagcatcaacctggctttacaggacatgaaccgccctcccatcagccgggaggaggccaacactacagtgggagacaggctggaggatgcctgccgccggattctccattcggacgatcaagatttgtgcgccaggctgctgcaggggatcatagaccattccccggaggcgatccggcgctacgcggcggtggagccggactgtgtccacatgctgcagacgctgtcccggcaggttccgctggctatctgctccaatgcggagccgggatacttattcgcccttctggatcagtttaatatccggcgttattttacctatatctggcaccgcactccgggctacgacaaaaaagcggccatccccgaattaaaaaagctgctgggtgtggagcgggctgtcatggtgggcgatcgggcggaggatgtctcctcgggcaaggccaacggttgcattacggtggccttgcagaacgactttggagcccgggacgccatcggcgcggattacgatgtttatacacacagagaactggagcagacgctgcttcagctcgttgcgcagggaaaaggagcgattgatatgtccagcaaggaaattctgaaagagtttatgcttacctccgcgcccagcggatacgaaagcgagatggcctataagctgaaggcccatttggagcagtactgccccgaggtaactctggaccgggtaggcaacgtgattgccaaggtgaccggcaccgatccgtctctgccccgggccatgatttttggccacatggaccagctgggcttcatcgtccgcaaggtggaggaggacggctttatccaggtggaccgcttgggagggatcccggaaaaggtgctacccgggctggagctggtgatccgcagcgaggatggcaaatggcatcccggcgtcttcggtcccaaggcacaccacgccacccccgcggaagagaaatacaaggtggatctggttacgtccctcttcatcgacgtgggagcatccagcgcccaggaggtccacggcatggggatctatgtcggttgcccggtggtctataagcctgccttccaggagctgtgcggccacaaggtcacgggcaccgccgtggacaaccggggcgcctgcacggcgttggttgagattgcccgacagctcaaggagactccgcccagctgtgacgtgtatctggtggggacggtctgggaggagttcaatctccgcggcgccatgatggccgcccggaccgtaaagcccgacctggccatctccctggatgtcaccctggcgggggataccaaggacctgtccacgaaatttgaggacaagatggggcagggggcctgtgtgcacctgtacagcttccacgggcggggcacgctgaacggcacacttccccacgaacccatgttccagctggcaaagcggaccgcccgggagctggatctccccctgcagcggtttgcctccctgggcattctgacggattccgcctatatccagctggaggggcagggagtggcctgcctggagatgggcttccccgcccggtacacccacaccccggtggaggtgtgcgatgtacgggatattgacgccctggccacggtctgcgccggcatgatgcggcggattgacaagacgttccagattaatcgctattaaacaatgattccgggaggtgggtctcatgaaatactttatgggtattgatattggcacgttcagcagcaaggggaccttggtggatgagcaggccaggatcgtcgctgagcacagcgtctcccacgagatggaaatccccagtcccggctatgccgagcacgatgcagagaacacttggtggggggagttttgtaccatcagccggacgctgatccagaagtccggggtggaccccaagcagatcgaaggggtgggttgcagcaccatcggcccctgctgcctgccggtggaccgggggctgcgccctctgcgcaaggcgattctctatggcattgactgccgggcaaccaaggagatcgcctatttggaggacctgtacggcaaggagaacattttccagcgctgcggtacgccgctgacgacccagtctgcggcggccaagatcctctggatcaaaaacaacgagccggagatctacgccaaggccgataaatttgtgaccggcagtacatatctggttgccaagctgaccggccagtttgtcattgacaattacaccgccgccacctgggttcccctctacgacatggaaaagctggactgggtggacgacacctccctgttctgtcgtcaggaccagctggccagatgcatgtggagccatgagatagcgggcaccgttcataagcaggcggcccgggagactggactggcggtgggcaccaaagtgaccacaggaacagcggacgcttcggccgaggcgttcagcgtgggtgtgctgaatccgggcgacatgatgctgatgtatggatcgtccatttttatcatccatgtggtggagaagtttaccatggacgaccggctgtgggcgggcccctatctgttccccggcacctattctgtggccgcgggtatgagctgcgccggtacgctgacccactggttccgggacaactttgccctggatttggaggccaaggccaagaccgaaggcaccaatgtctttggggagattgccaagctggccgacggcatcccggccggttcggacggactgaccattctgccctatttttccggggagcgcacccccatcaacaatcccaatgccaagggtgtgattttcggattgaatctgcagcacaccagaagacatatctataaagcgctactggagggcgttggctacggaatcaatcagcactttgagatttttgacgcgctgcacatggggaccaaaaaagtaatggccgtgggcggaggcatcaaaaacatggcctggctgcaggcggtgtcggacatcagcaataagtgccagcatgtggcccaggtggacactggcgccgcctatggggatgccctcatcgccgccctggctaccggcttctaccgggattccgcccaagtggccgagcagatcaaactgcggtatacggtggagccagaccccaatgcctatgaggcatatgccccgttccgcagccgatataaccgtttgtatcttcagacaagagatatgatggacgaattttaatggatggagatgacgccatgttgaaattagaacgccatcagaagattgtagaatatgtcaatgagtatggcgcggccacggtggacgacttggcgtcggagacccaggcgtcccttgcaaccattcgccgggacttgattcgattggatcaggagaagcgaattctccgcacccacggcggagccgtccggtataaccagcccgcgatggaggatctgcctctggacgtgcggcagcagatgcaccagaatgagaaagaactggtggccgaagccgccgttcagctgatccatgagggcaccaccatctacattggagccggcacgaccggacatgccttggcttccaaattgggaacgttccaccacctcaccgttctgaccaacgacattgacgtggcccatgagatcgcgctgaccgacaattcgctgatcgtggcagggggacagctcaagcctcacagccgaactctgtacggctttttcgccgagctgacgctacgggagctcaacgtggataccgcctttatgatcgtggacgcggtggatttggacaacggctttatggattacagtgtggacgaggttagcctgaagcggctggtgattcaaaatgctaaacactgcatcatgctttgcgacgctgcaaaatttcagatttccgctctggtgaatgtatgccacctgagcgatgtccagacggtggtcacgaacgcggaagcggaccccgcctgcctgaagcggctgaacgagagcggaattacagtcgttcaggcggaaaaatacgacaagggggatgaggtatgagatcgaagctacacaagggaatcaatatttggtcctttgaccagagccgctcgatcgagcagtgcatgaggctggctaaggacgccggctttgagggaattgaattggcaatggccaaggacggccctctgggactcaccagcagcgaccaggaaattttggcggtcaaggctctggcccaggaaataggcatccagatctgcagcctggcgaccgggctgtattggcagtattcgcttacggccaacccgcctgaaatccgggcgaaggcaaaacaggtggtgcgccgccagatcgacatggccgccctgctgggcgtggactgcattctggtctgccccggtacggtgggcgtagacttccgcccggaagacgtggttcccgacgccaacgacgtcaccttctttgccggcagcgagattatcgactatgatgtggcttatcagcggtcccaggaagcgctgaaagagctggccccctatgcccaggaaaaaggggtcatcatcggtattgagaatatctggaacaagttcctgctcagccccatggagttccgaaccttcctggatgaaatcggctctgactatgtgggcgcctttttggacgtgggaaatatggtcctttacggctatccggagcactggatcaagattctaggccatcggatcaaaaaggtccacttcaaggactaccgcagagatgccaagggattggccggctttgtggatctgctggccggagatgtggactgggtgaaggtcatcaacgcgtttgaggcggttggctaccagggctgggccagcgcggagatgtgtcccacataccgcctgtataccgatcagatcatttacaatgcctcggcagccatggactgcattctgcgccgtaaatgatctcccctccgctgaaagcggacaacctggatcaccgaaagaaggaaacagtatgcaaaacaaagtattcagcgtaaaaaacattgcgaaatctttcggaagcgaaaaggaacgcaattacatcgaggttattcgggacatcagcatggacatcgatgaaaaagaatttattgtgatcctgggaaattccggctgtggaaaatccacgttcctcaagattttgggcggtatcgacagcgcgaccggaggctccatggagttgtatggcaaagacatcggacggcagattccgcgggacgctctgaagcacttcggatttgtttttcagagcaacaacctgcttccctggcgtacagcggagggaaatctgcgcttcaatctgaataccatgaagctcaaagggccggagtgggagaagcgcattgacgagatgctggacatcgtgggactgctggactataaaaaagtctatccccacgagctctccggcggcatgaagcagcgtgtcggaattgcccgtgcgctggtccacaacccggatattctgattctggatcagcctctgggcgctctggacgccatcacccggaagatgctctcctatgagattctgaatatctggaagaagacgcagaagaccgtcatcatggtgacaaacagcgtggacgaggccatcctgctggccaaccgcatctttgtgttctccaacaagccggcggtgattacccatgagatccaggtagatattccggtggagcaacgcaaccacgaaattgcaaacaatcaacgtttcaacgaattgcgcgaacagatcaatgagatcgtgcgggcaacgctgtaagggaggttacaaactatggcacaaagcactccggtgaaacgtacccccaaaaaggagcgggaccccaaacggatcattgcccccttggtggtgctggctgtgatttacatcggcctggaaatctttctgcgggttttcgatgtggcggcctatgtcatgcctacgcccacccatattattcaggcgaccatcagtagcttctatatcattttgcccgactttctgtttaccctgaaaatcatttgcgttgggttctgcattgcaatcccggcgggtatcctgctggccgctctgttttctcagtttgacattctggtcaaggcgatgcagccggtggtcatctggctggtcatcacccccatgattactctaattcctctgatgaccctgtggctgggcatcgatcccaacctgcgcgtaatcattgtgattattcaggccacccccattatctgcctgaacaccctcaacgggtttacccatgtggagcgcgagaagctggagctagcccggtcggtgggggcctccaagctgcagacctttgcgagcatcatcttcatgaacgcgttgccccaggtatttaccggcattaagctggggtgcattttctccaccatcggcgcggtcagtgcggactttgtcagccgcggccagggcttgggcgaccgaatcattaagtttaccaagtacagcaattttgaggagagctacggctgcatcgttttgattgccctgattggtattacgctgtataccatcgtggaaatgattgaaaagcgcattgtgctctggaagaagtaaggaggtgaactgccatgcaagaagcgaaaattaaatttgaccatgtgacgaaggtctttgagaccagaagtcagaccattacggctgtcaaggactactccatggaaatccaggctggcgagttcatctcaatcctgggcccctccggttgcggcaaatccactctgatccggatgctggacggtatcattgataccacagagggcgatattctgatcgacggagtcaaggtcaaccacaagggaaagaaaatgccctcttccgtgctgcgcaagctggggtttattttccagcagccgaatatacttccctggtataccgtgcggcagaacgtggcgctccccttgagagtctttggtctaaaagggcctgaatgggacagccgggtggatgagctgctggagatggtggggctgaaggaatatgcgggcgcccatcccaacgagatctctggcggcatgctccagcgggcgggcgtgattcgcgcgatggttcatgaccctgagatccttctgatggatgaacccttcggcgctttggacgagatgacccgcgagcagatgaacatggaactactggagatctgggagaagacggggaagaccattatattcattacccacaacattgaagaagcagttctgctgtcctccagggtctatgtgatggggacgaaccccggtcggctggtggagaccgtcacactggacctgccgagaccccggaatctgtccatgattacgcagaaaaagtttatcgagtatcgtcagctactggagagctacatcggcgaaatcgacctgagcaagatcaagtgaggtggagtaccatgaatgttaaaaagaaagtaaccagtattgtggctccggtcgtcacgtttctgctgatatttgcgatttgggagatcgcctgccgcgtcaatgagataccggcctggtttctgcccatgccctcggaaattttccgctcgatgatcgtagatttcggggagtattggccccatctgctggtcacgctgcagtgtgtgctgacgggttttctgattgcaattccggttggcctgctgctggcaacgctcattaccagcttccccctgctgaatgcggccatgtcgccctatatcacctttctggtgaccacccctctggtttcgctgatccccctgctgatgctcatgatgggttacggcatgaatatgcggattaccaccgtggtgattcagtcatttgcagtcatcaatatgaatgcctgcaccggatttaacaatgtgccgaccttgcgccgggagctgatgcagtcggtgggcgccagccggtttcagagttaccgcatgatgatcctgccctccgccgcgaccgacatcatcaccggtctgcggctggcggccatcttcgccaccaccacctgtatcagcgtggagtacaatgccggcaacaccggcctgggctctcagatcatcaagtattctcagtatctccagaccacgcagtcttttgcctgtatcttctatgtcacggtgattggcctgatcatgtacggcctgattaccctaattcagaagaagattgtgaactgggaggagtaaggctttctgccggaaaggatgtccctatgtctcagcctgtgaatcgaaccgccgcgcgtgtcttgtctctggtgatggtcgtcctgtgtatggttgcggccggtgtcggagtcagactcagccaggaagaaaagccctactctctgggcgatttcagtcaggtttctttagacgaaacacaggaggagttccagaggagccagagtaacgaggacctagtcaccctgctgaaagtgctgtgctggcaggcggtggaaggaaacaatccggaggcggaagagatgattgcccagtacggcacattgttgttcgaccgggcccgggcgggcgaggcagatctttccgaggtaggggacgacgaaaccatgttggaactgttgcgtctgattcgctccttcggggctgagtaaagggatcggggcttcaaaatctgacggaggcgtttgtgcaaatgcgaccggaaacgacggtttgtcagccatacgggcggacagcggaggctgtcgcccgtatatgttcccggtggaggccgtcggcgaacctgtggaaaatctggtccatccagggccgcacaaacgttccgggcggtaaaatataaaacaaaaggacatccgaagtcttaagccccatagctacacaatgtgaacctatggggcttaacgccgtgtatggggaagaatgatctgattttatagaatgggtggggatagctgacgatgttctccccgtaagcgtcaaatataatatgagataaaaagaacgagagcagccaatactttgtctgctctcgttctttgcttctggaagcaataaaaattttgagactacaatttaagcagggcgctcaaattcgtcagagcagactgcatggaaaagtacagcaagaaattcagcggaacgcaagcgcctgtcaaggtgtctatgggaaagagattccaacaaggggagattgtgcttccaggcaatagtagatacagttcgaatatttcgttccaccgccttccagttcgtcccatacttcctggcgacatcgggatacagccactttgtcaccaacaaaagcctgtcttgctgttccacgcacaaagatactgcataagcggtatggagaaatcctttgtaattagcggatattccaagctggtataatagatcacaaatggctgaggaggcaaccatcgtatcatctccttatatggtttctaaagactttattaaatatttcaatcccttttaagtggagattagaacatcatccttgtcaagaatattgagtgctgatttttgcccggggtagatgatctgggcgtgcttgtaccaacgccaatccaggcgttgtccgcaatggtcacaaaagttctggccttcacgttccaaagtggccatacacgcgggacagacaggaaatgtggtcaatccggccggggatgtaaaagccattgcttgagaaaccaggagcggtttgttgcgcagcagcaactttgtagtcgattcaggcggaatatcagacattccgaatatgtcaggcgagtctcggaaaagaaaaccagggtcacgctcaatgaattcaaaaaacgggagatcggattgaatgtagacagctagataggtaataaaaacgctgggatctggttcctgcttcatagagcgtcccagataagaaagaaccaaatcttgttccacaagtgcatcccagcagcgatgcgccaagcgtatcacgctcttgtacacagtttcaggctttttatgaagcagtctggcaacatcggggtaaatatgtttcgttgctttaatatcggacatggagatatgctgttcaaataagaggtcattggtaatgtttagagcaagaacgagtggacggatattcggacgagttgtaccaaaaatattgcgcaggaaaatttctgtgtttgccataaaagaaccacctttcataagatagttccataatatgacaagatcagacagatagacgacatgggataaaacaggacaaaacttccttgtttttccataccgcggtgccaataatccctattggaaaaagcaaaagcgggcttaccaatggcaatcccgctttcacaagatatattctatttctttgtaatacaacattctgggggaatattttccgggagcagctttgcggcccagttcttgtcggtaactgccagtccgggtgccttggaaaacacatgaaccaaatatcggtatggatcaaggttattctccctggccgtttcaatcagactgtaaacaatggcgctgctctgagcaccgccctccgtattggcgaacagccagttcttccgccccatcacaaagggtttaatgctccgctccgcccggttgttgcttatttccagacgcccgtcctctaaaaagcgtttcagatatggccactgctcccgcagatagtacagcgcctttcccaaagaggacttgggcggggcggtcttcgtttccgcccatgccaacaaagcgtccatcaccggcttggaccgggccagacgctggatataacgttcttccggcggcagatccgctagttccttttcaatggcgaaaagaatattacagtattgcagtccctccaacgccgtgcagccaacctgctgctcttttggcaaggcgttcaccgcctcgtcaaactttcgccgcagatgcgcccagcagccaaccacccggatgttctccggcaatcggtggtagcaggaataaccatccgcatggagccagcctgtaaagcccttgaggaacgcttcggcattctccgccttccggttctgctggtactcatacagaactatgggatgctcggcgtctccgccagtccggtacagccacatatagcacttgctcctggctgtccgcccttccaacttcagcacctgcaaggttgtttcatccgcatggagaacctcgcgctgaagcaactgccggtgcaagtggtcatagatgggccgcagccagtcctccgccacccgcagcacccagttgctcatcgtctgccgggagagcatcaccccagcacgattccattcctgttcctgccggtacagcggagcgtacatcacaaacttctgcaccatgatatgggccacagcctccggggaggtatagctgcccgaaatcaggggaggctcttttggggctttcaggataggtgtttccgtccctgtctgcttgcagttctggcaggcgtatgtaaaataaacatcttcccggatcttcacctgggctgggaccattaccagagtacggcgcacctcggtcccaatctctgtcatgagcgtaccgcattcaggacagttacgttcagactccgggacgcggtgctccaccacctcaacagggatgttctcaggcagaacctcctccacacgggaggatcgcttctgccgggtatgagcggcaaccctggtttccctcgtggcagtcctcctggtagacagccatgcttccgtctcatcaaacatgaaactcagctggccaaccaactcctccttcgtctgctcggaggatgtcccatagaccttctttttggcaagacgcacctgttccatcagccagtccagcttctggttcagttcgtctcgttccgcctttagagactcatattccgcacgggaaatggtcatcatttctgtgctgcttgtggtaatgttcacttcgtttttcatgttttattataacataaaaacccttgaaatatcagttctttcaatggtttgcgagaaaatagcatccaattttcaatgctataccatactcaggccagtcactgctttgtgcgctttgggctgttcgatcttcagcccttccatcagccagcggtactgctgtggcgtcagcatcttcacctcaacttcggacctcggacactggtacgctccctgctccagcctcttgtagaggaggatgaaaccatcccgttcccagtacagcccttttattcggtcccgctttcgcccgcagaacagaaacagtgtgttggtgaatgggtccagttcaaactgctgctgtaccatcgcggccaaaccatcgatccctttgcgcagatctgtatatccacaggcgatgtagaccttgtctgctccggtaaaatcgttcagcattgtctcagcagctccaccagagtccgcagcaattccggccccatttcctgatacagatcaatgctgctactcccgatattgagtgtagcggtacgttccgaattatttcgcaatggttgcggtgctggcagttctacaaatgtgcccccagaacgtccctcggcgtctttcctacctataccggacagaacctctctttcccatcggtaatatgttgttggcgtgatgccccgctggcggcaccactcccgcactgacagcccgctgctccggcagtcctgtattgccaatccccatttctgaacctttgcctggtgcttcagttcattgctcgtcatccggatacaccgcctaatagttaatagtgccggaacgtctcaaaacgttccaccactattctctcatgtctgtctacccgtcactttacttgacgcttaccgttcaccatcctaaattgcttttttcagaaactaccttgacaaatcatttcacaaacattatgatacttttgttaatcgattaaatagttatgtcgtgcgtttcatttcttttattagtgacactggtggtgtatttaaatgcaaacatctactttaattaaaagtatcaatcgcttttctgctctccataaggaaaagatatcaaaaataatagaaacacagggcttgtactggggacaacaccccattttatgggatctgctgaacaacggacctgaaacacaagctgaattggtcaatcatttgggggtctccgctccttccattacaaacagcatcaagcgtctttccaaaaacggctttgttaccaaacaaaccgatgaaaacgatcttcgcaaaacatgtattcagttgacagaaaagggggaatttgctgcattgtactgccggcgtgaatttgccgttttagatgagattgcctttcacaacttatccgatgaatctcgggaagaggttaatcgattgtttcaacagatgatctgcaatttggaacatatggaataagacaaaggctgagcctttgtcttattctttgcacaaaaattcttttgtattttgttcgtttttatctattgacaacgaatgcatgctgcgttattatttaatcagttaatatttaatcgattaaataaaatgcatctgttaggaggagattgtatgagtgacaaaaaagaaaaatttctaacacgcaattacattctaatgcttctgctgaattgtatttacggtgtatctcaaaatttcattaccacacctctggccaagcaaggcgtcgcaatcggcctgagcatgaccacaattggcactatcgcttcagccgttactatcattgccatgatctgtcggcccatttttggtaattttatggacagaatcaatattaaaaaggttttgtatctggctttgggctgcctgtttctctcctttgccctgattggtctgggtagtaacaacaatgctgtattttacacagtcggccgtttggtctatggtgccggtttttccgctgtgggtacctgcctggcggctgcaacctctctttccgtatccaagactcagattgcctctggcatcagcgttttcttgatggctcccatgattctaaaaacatttaccccgaatatttctatgtggctgattgaaacctacggctataaggtcaacggcttggtggcagctgttcttcttgctactggttttatttgtgtagcacagcttgatatttcccagcaacaccgttccatagccctcaaggaaaaggagccatttaagttaagtaatctcattgctaaggaagccgttcctcctgcgattgtcaatgtgtgctttggcatgctgaccacagcagtcgtctccaacatcattgtgtacggagacaacatgggcatcgccaatgttgtaatgtttatgaccatctataacgcctgcaatatctttacccgcggctgtggggggtttattgccgacaagctcggggtgcgtgcgctgatgtatccctgccttctatgcgccactggagcactgctcgtgttggcctttttccccacccttcccatggtatgtgtggcagccgtactctattctttgggcttcagcggctctatgtccacagttcaaacaatgtgcattcgaagcgttgaggctgagcgggcaggcgttgccaatagcacctactatctgagtgccgatttaggcggaatcatcatcaaccccattgtaggtatcatcctggatagcgtagggttccagtttatgtatctgaccatgctgattccagtcgcaatcgccgctgtcgtgtttacggtgattatggccaccatgggggaccgctacgcccgcaagtctgaaatttctgcttcttaaacccaactctttatcaaagcgaggggtcgcaatgggacaaacagttctcttttttgctacacttgcctttacgattctgattggactgaaagcaaacatcaatttgggtgttgtaggtattgccatgtcttttttactggggcagttctgcttgcaaatgagcgcgtctgaggtaatcttacagtttcccaccgcactgttttttgtcctttttattaccaccatgttttatggctttgccaatgagaacggcgttttggaagggatatccctaagactgatccagcgcttttctcatatggaatggacagtcccattcctcctatttctttccgccgctactgtctccgcgctgggtgctggagccatggctacccctgtgatcatttctcccattgctttctccatggcacagcggttttgctttcatcccctcatcgcctccgtgggaatttggtgcggaactatgctgggagattccatgccgtggagcgccacctaccagagcaatctggcccgttaccaagtgttttttgactcagatactgtgacccaggcgcttatctgcaagacatggtggagtcttgtcctcttccccctcactttcttgggaatatattttatttggcggaaaaaaagcgtgtcgtgcggaacagaaaatatcccagacgccgctccgtttacgaagcagcaaaagcttaccttgcaggtgatcatttttgtaatcatctgcgtgctgttaccaggaatcttaggcttactctttcccagtccagtcatttccttgcttcaggaacgcctatccattcagcttttgacatctgtggggactgtaatactcattctgtttaacgcagccgattttgcccaggttttgcaaaagcgggttccgtggaacatgattttgaccatttgcggtttgaccatgttgatgagcttttccaatcgaatgggcgtgttggaaaccatgagcgccttaattggaacatggctgccaaagaaagcgattcttcccattctgattttgctgatcggctctctcacatattttctggatgggcgcgctatttcttctttgatgattcctttgttgccggcattggtgcaggcatccggatacgaggcggaagaactaattattgcctatatgtttgcgggagccattccatctatcagccccttctcaaccggaggcgccatggccttgtctggctgcagtgaagaacgcgcccgcacttgctgtatccgtcagcaaatgtatttgccttggccattgctaatcgttttaaccctgctgggcagtgcaggaatttttggttttgcattatgagtgaggtataatctatgaacgatatgatattaaaagacggtcgcatgcctacaagcacaccggaagagcagggaattccgtcccatgcaattctctggtttcttgaccaagtagaaagagaacatcttgatcttcacagtcttcagattgtgagaaacggggtgcttgtggcagatatggttgctgcaccttttacccgggacagctttcaccgcatttattccgctgcgaaaggtttagtggcaactgcaattttattcacgatacaagacggcctctatcagctggatgaggtggttctccctcatatccccgcccagtggctgccggataatctggacccacgatggaaaaaactcacgctttatcacctgctgaccatgaacaccggccacagccaggatacgctgtttaaaatgtgggggggcagcgactgctggatcaaaacctttttcgaagtaaagcccgcctacgaaccggggacctacttctgttacgacatgggtgcccagtatgtcatgaacgagctgatccgcttggccactggaaaagataccggccaatatctaaacgagaaattgtttgataagctggggatcgaataccaaaaccaatataccgaacccgaaggtctgtttttctcctcaactattcagttaaagcctgacgggctgactaaactgtctcagttttaccttcagggcgggagttgggaaggcaaacagcttctagattccaagctggcaaagcttttgggtgagcggcaggggcccagccgccattacgaatatgtccgctccggacaattcgacaacctgggcggatacggactccatatgtggcgcaacgaccttggcggttatcgttttgctggcggacagggacaattaggcatcattatcccagaagaaaacttagtaatcagcatgcttgcggcggaacaccgctcttcacggttgatcaacctaatttttgaagccctgtacagcgaaatgtaccgtcggcctgtggaggccgcacccgttcttcaggccgagttgaaccgccgactaaagcaatacaatttggcccctcgcaatgtgtcggacacctcttcccttatggatacaatcagcggaaaggtctatcaacttgagcaaaatactctgagggcggatacaatttcttttcagttcacccccgaccaggcggtcattacgttgggctattccgaccatacatcccgtcaaattacctgcggcctacgtggagaatggaaggagagccaagaaggctttttcctgatgaagacgtctcctcaaaaaattgccgacctggatttaatcttcggatacgacccgaatattgtcatgttcagcggcgggtggaacggatataatcgttttatcttttctatgcgcagtgcggcactactgtgtgaatttctgtttcagtttgagtttaatggcccggatatgactataacgctcccctttaatgattatcttccaaggactgagtgcagggattccaagtttgttcctcccaagattcaacttctgggacacgtatgttcttaatcattttcgtatattgaccaggccggacatcccgcaaaaggtgtccggcctagttttttatgatttctttcaatgtgaatgtactggtccatctatttgctatgaaagattgccttacggagtcggcacacctacaatctcatcttctcccgccacggtcttccaattcccagcccggcccccccgtctgttttggggaaacttcatgcgattttggtaaaggtcccaccatcaatttcataaaaggtcttggcaaccccggtatccttgttttcatcgatcacgcagcatccagagccatccgctttcacataaatctgggggaccttatcccctacaccggcattgatgaaatggctgccgtagatatcaagaagaatgtccctcggaacagcgctccttgtcttgggggcatcgtgtcccaatgccgcgagcgggatgtgaacgtatccctccaacacttctgcatcagccaccgcccgggctttatgacagatctcttcgcttgcagcatccatatcattgtctggcatgtcatcgtcatatcgcatctccgcaaaggcagatatagagatcattaggctgccagccatagccagtgccataagagcagatgctaattttctcttcataaaaattacccccttccaatcgcaacaaagaactgctgccctttgtcaaccttatttcagggcaaatctcggtgccaattttctccttcatttcctttatgtcgccagtgcaggattttgttgcactaatttttaaattttccaaatttttttgctcctggtccgaaggggctctttgcgcctcctttccctctatgaaaacaggggaacgaccagggcgttggggcgaccttatgtagggctggattgccggacagcaactctcacagggcatccatgctggcacaattcatctgccacccgagcagttccggccagaaaaaagaaaggcgcggcaagggggccccctgccgcaccaagcttgatttttattttccggttacatagaatgttcttgttctggtgtctcgctccgaaccatcgtccgcaaataccgtgactaccactttatattctacgcctttttcggcatcaaactcaatatcgttggaaaaagctcttgcgttagaacgggacatacctgaatctttttcatccaatgattcacacaaaatccacttcgttcctgatagctcataaaggtcaacgctttcacatccgattttctccatcattgtattcgcatcaacataaaactcaacccagatagtatttgaagaagtcgaagccgtgatttcatatgaggaaatctgcgcactcgctcttgcaaaagccggaacagtaagcatcgtcaaacaaactgcacacataaatatcgccaataggcgctttgtaagcagtgtttctgccctccaaaagatagttttggacaatagggattttatgctcttatgttacgcattagaggcttaataatccttgtaggaaaggcattacagacacgaaaactgacagggtaaggtgtttgtatcttttccatcaaaagtgccctttgactgcgtaacatcccaatacaagctgctatctactattttttattatcttccgcttgaagcgaggaaatcagctatttcagacactcctgtgcctctgaaagcatctttttcaatgtgtaaagtacctcatctaggccgggacggtccaaatcgtcataatggatcccgcataccacacagacacggcggcccgactgctttgccagtgtctccgcccactcctccgcaaccgccttctcccgatgcccaggaaaatccatcgtgcggaggagcccccccggttctgccgctgtcacacagccgatatgggtccggcagccgccggtgaggaggactgtgattccattatcgagagaggtcagctctgcacggaggggccatcccaaagcctgccgctctatcgtcataaatcaagacctccccattctgggattgcccctgtatccagcccgaacagcgccagcaccttggcggagattctcccattgatatcgtctatgcacttgggatgctgatagtaggccggtacaggggggacaatcaccgcccccagctcactggccgcagtcaggttgcgcaggtgcagggtgctcagcgggcactcgcgggggaccaggaccaggcggcggcgctctttcaggacgacatcggcggcccgcagcagcagggagtcggagtatccggtgacgatgcccgccagagtcttcatgctgcacggcaccaccgccatccccagcgtccgaaagctcccgctggccacggctgccccaatgtctccgttgtcataccagacatggctcagtcggcgcagttcctccagctccatcccacactcctggcgcagggtcagagcgccgctccgggagcagatcacgtggctctccgcatccgggatggttcgaatctttcgcaacagctccacggccagaggggcccccgaagcgccggtgatccccataatgatccgttttttcatggcagtcacctcgggggaaacagctccgggagccaatgggcaggatctacctccagaaaacggctgcggcggaagcgctccttctggtcaaagggaacggtgcagtcaaaaatcgttttgcatgcgatcccgtggtcccggatggagggggagacggcggggtcgttggaggggtccaggggatggcaacggactccgggaatggtaataatgtctgtatctccctgaaaacgggtgttcatggcccagagcacatcgctgatgtcaaaggggtccacgtcctcatccaccaggaagatatgcttcagctcactgaatgcggagaaggccagcagggcggcctgacgctgccgcccctcgtcggagggaacggattttttgaactggaggaccgccatgaattttccccctccggcggaggcgcagtacacgttcagcagccggccgggcatggcccggtccaccatgtccaggatgctggcctctgtggggatcccggccatgctgacatgctcctcgctggggccgatgcaggtctgcatgatggggttcctccggtgggtcacagccttgaccttgatgagccagcactgactgctggcggggccggtatagccggggaattcaggcatggcatatccggtatggctgttctggtcttcctggacccggaccccgggctggacctctccttcgatgacatactcggcgagggcgatggcccgctggtccacggtcaggcaggggcacagctccaccgcccggccccgcagagctccggcgatagagagctcatcgtatcccagcggcgtcgtagggggctcaaagcaggaggcaatctcaatggctgggtccacgccgatgctcaccgagatgggcagggggcggcctagctgttctgcccgctctgccatggcaccgatgtgccgggccccgggggtaaagaagatggacagctcatcccggccctgaatacacagacgatggatggtgatatcgtttaccccggtgtcaggatgggtggcgtagcacattcccagcgtgatgtagggcccggcgtcatccggtgtattggtgggggcagggaccagggctctgaggtcaaaatccgggtcatctgcccggtggactacctgttggcagggggctgcctccgcgcaaatcacgggcgggatggggcggctgacacaatcgcgcagggcatgacccagctcctccggcctccgccccagcagggcggccacccggctccggctggccaggacgccgatggcgacccgagcgccgggatggcccttgatctgatgaaagagcatggccggcccttcccgggtgggccgctggaccgtccctccagctcctacgtgacggtagactcccgccagctcagcactggggtctaccggaacatctgtctccaccagctgtcccggttgtgaacgcagcagattcagagcgctgcgcagatcatagacttgattgttttgatccatgatagttcctccgatttaaaatctgatcttctttgttttgctttacaagtagtttgatgttcgttacaataggataaagtacagctttcgctgcggtatggcggggcagggcccgaccttccggttacgccggacggtctatagaggagaaagagagcggagcaccgatggaatttcttcaaatgaacgcatttgtgagccttgcacagagccttcatatgccggtcacggcgcaggagctgaatacaacccagtctcacatcagcaagctgatcgcctccctggaggccgagctgggggtcaagttgtttgaccgggttggccggggtatcgtgctcaatgagcatggaaagctcttctatgagtatgccgcaggggcgctcaggctgatgaacgacggccagacagccctgaagggagtcaaaaattctgtgcttggcacagtgaagattggagcatatgcctttacccccattctccatccctgtatccgtacctttgcccagaaaaatccccaggtaaatttctatttttccgaggtccagcagcagaacaccaacgtcctgatgaacctgacagatctggtgctcgtggcggagaaggagggcagctacaccatgcagagccactttccagtctgccgggagttgctggaagaggagttctatgtggccatttctcctaaactgttccactatcccaagagtaagacctccgttaccctgacagaggtcagtcagttccccatgatcgaggtggccccctctccctattaccaaaactgggtcttccgggagaaggacatggagcacttccgcgacatcctgggagtcaccttccgtatcggctataccaccaacgattttttcaccaaggtatccatgctggatcaggggctgggcttcgccctttttccagaggtgtgtgtggcttccgcgctgcggatcgccccggatctccagatcctccccattgaggactaccccatccggcggcgcatcctgatcgcccggaagccccgggagcagatgtcctcctcagcccgtacgttctgggattttctgctggattattacgatttagagccggaccggtgacggcctgtgactgaacggccccgcaggactttgttccgcggggccgttcagccttatgagaatgagcagaggaggaagcaagactcaggggcaaaggctacggatccaagtgaaaagctcgtccatgtcgtagtccccggcgtgggggatctcccagggcatgaagtagtccacatcgaacccagcctggcgcagaacggcagcaaagataacagagacggccattgaggtgtctcgatccaaagtcccaaagcggatgcgccagtgacggcacacctgagaacggtcccctttggcgaaggtgagcggattcatcagggcgactatgcgagagtcgcacagctccccgcccgctgtactgtgggctttcccgtattccgtgaagtgctggaactgctgttttgccgtgccgaacaactcattttccggggatctcagatcccactgatcaaaggctggcagctgcttcattcgggtggcataccgggcgtgggcagccagatccagagccgttactctgctgttctccaccgtgatccagggcatcccgctcaggtcagcaccctggtccagggctcgctgagccgactgcacaacaaaggaagtcacatagttccggaagcttccgcttccatccgaggatagctccagagacgttcctgttccgtcttccaaccccagggagttgacatagtcggcaaaccgcgccaccaggaaatcagactgctcgatctgttccggcgtcatatccccttccacaaaggattcatgaagctctccaccgatatttttgacgatgtggagctcataatgattgaccccgtggaacatccactcataggccatatcggcatgctccagatccatgatgggcgtgtagcagctggcggcaaagatgtcgtcccgttcctgagccgcgcccagcgcttctaggtagggttcatactccacgctgtttcctgaggtgcccaacagagcagagagcgcgccgccagcgctggtgccgttgctgatgatgtgctccgtgtcccccaaaatacggtctttgttgtggcggagatagcgtactgcggccttcaggtccacgatatgggcgggcgcgcagcctagaaagtctccgttttcatcttgaaccgtcctgcctcgggagccgggggcggctacgacgaagccggcggccagggcgtaaaagatgccgttgggctttcctctgccccacaggcggaagttggggccaggacggtccgcgggaccagaggcatacgctccagaggcattggggaaaaagataggcactgttttccctgtatagccatggatcgtctttccctcatagtagtcctcggggatgtagaggttgagcttctgatgctcaaggtctacgggatgccggacatagaccaggtcctcaaaggcccgaaagcgaatggtagtctcccccatggtcagagtacgtacctcatactgattttcattcagatccagagaatattccatagcggcagtttcctttctatttgtttacagtagcccgaagtagaaggggacccacaccgcggtgacgatagcttggaccagaatcaggggggcaccaaatttgatcatatccttgtaggagtagccgcccatagtatatgccagcatcccaccggggccggacagaggcgtcatgatggaggccatggaggaaaggtccacacagcagatgatgggcagcggattcagccctacacctccgcaggctgcgatcatgacaggggtcatgatgttgaccagagtattattgtcaaagaactgagtcacaatggcgcagaagataaaaatcaagatgcacagcaggatcaggctggtctggtcggtaatgacccggccggtgagctccgcgatcacgtcggcggcgccggaggaaaccagcgcggagctcatggcgatgccgaaggcgaccatgaagacgatggaccagttcacgctggcaaaggcctcccgttgaggaagaatgcccaggaccagatagaggaccgcgcccaggaaggcaatctgccccccggagatgcccagctgattgttgaagatcatgcccagcaggaccgcgatgaagatgaggtaggaggcgatctccttccaccggggcagatcagatgccttcagctgcacctcatccgggatatcgctgctgcaccggcccggcacatcggggagcagcttgtagccgatcagaaccacaaacagcatagcagccagcacgccgggcagacgtgtgcccatgatgtcccagaatcccagcgtgtagggggagcccatggtcgccaagaattcattcttttgcaaatacagggaggtgctcatgccaatgggaaacagaccgatgccgaactgagagcccaccagggcaggcaggatcagacgggtgcgggggatgttgttggtatccgccaagccgaccagcagagggatggttgtcatcagagaactgacgcctcccatgaactggcacagaacgaagggggtgagcatggccacgatataaaggacgcgctctccgccattgagccgtttgaccagatgtgtgatatggatcagaatgttggtcttcatcaggccagcgctgcacatcatcataaagatcataacgataatggtattgccggagaactggccgaatgcggtagcagtgtccaggattccggtaaaccagaggaacccaagggacagcatcacaacgatgcatggttcgatctttccccagatcatgaatacgatcatgaacaggaatgtgccaaataccatggcaatttgtggggtcatgatagtctctcctttatctgtttgattccgttccgcgaatcgctcaataccggtatctcagctcgactctcattctaatcggagcggcctctgtcttcaatggttccaatcgcatcgaccgattcccgcatggaatcggtcgatgtgtctttatccattgaagcgcgccaatgtgctgataaaataggagtatcctaatacagaatgttccaaataggaggtatcaaatggaacgaatcagcccgcggtttttgaacaccttcccgcccgataagatgctgtgccacccttactggatggcggaaccgccctttcgaatctggggcaatctttacttcgtgggaaactcctggtgctcctctcatctgatcgataccggggatggactgatcctgctggacaccccctgtctggccgagctgccctatctgttggacagcatctggtctgtcgggtttaatccccgcgagattcggatgatcctgatctcccatgcccaccacgaccactacggtgcggcatcggcactgcgtcatatcacaggggcaaaaatttgtttgagtgctgtggatgctgcggatatggctgctaggccagagtggttccaccgccacaatcgggagcggatccccccggacgaaaactttcgggcagaccgcctcctggaggacggtgaaacagtcaaattgggagacacgcagatccagtgcgccctcacgccaggacacacgccggggacgatgtcccacttttggacggcacatgaccgggagagggggcctgccagaatcggcatttacggaggcgcaggcttcggaacggttcgcaccgcctttctggaggaagcagggctccccctgtccctacagcaggcatttgaagcatcaattcaaaaggtctggtaccgccctgtggatttgatgctgggcaatcatccatgtcacaacgacacattttccaaatggcggcggctccaagctggggaacaaaatcccttttgggacccctccgaatggcagagatttctgggggagctccgatgctcctatcgggcgttcatggctctggctcccgcggaccagaccgccctgtatgagcgcagccggttctgcgactattgcggtgaccgcgcggcccgatggtttcagaggcagggatcataaagcgaaccattgctgagcgatgatatttttgagcaggaggtattttgatatgaagaaatccatccaggagatccgggcggaggcggagctgcccctggatctgtcacagctacccatccgggtcacgctggatattccctactgcatagacggaaacccggcccacaccctggatatcgccttgccagcacagggagcgggaccttttcccgcagtggtattcatccatggcggcggtttttattacggctacaagcataatgttcacaccgcaccggcatggaataccatccccgccgccggctttgcactggtctctatcgactaccgtctgacaccggaagcaccctggcccgcacagatttatgactgcaaggcggcaatccgttttcttcgggaacatggaagcgaatacgggctggatccccagcgcatcggggtctggggcaactcggcgggtggactgctggccgccgtcctggcctccaccggagacgcccccgcctatgaggaccagtctatgggctgtcccaaccagtccagcgcggtccaggctgcctgtgtctggtatggaatctatgatatcccaaacctccaacatcactggtcccgtatcctgaaatcgggggagagcccggagcaggaggactatgatgctctgggcgcactgatcaacgccccaggtcatgaccgtgcggccatggccgcttttgccagcgctgccctccatgtgcatagtgagatgccgcccatgctgctgttccatggaaccgcggaccatgtagttccctatctccagtccgtggaattttttgagcgttatctgcaaaaaaataaccacaaccaaatccatctttccctgttggaagacgcaccgcacggcggcccggcctttacagagccggagaatctaaaattggtttctgattttttccgaaaatggttgatagattcaggaaaacaaccggagacacaaaaataatctgacttgtgtgctatgtgaagaattttgttatcaattttccaaaagttgtaaagtcttccaatctctaaataaagaaggacggctgaccagaatcctggtcagccgtccttcttttataagccttaaattcaaaattaaatctaaatcttacccgacgctaacacactgttttgtccggctgtgaatacccaccacagcttgattctattcaggcaccgcaggcgggaactgataaaaactggtcccggctcccggggtatatgagaactctttcaaaaggtctaaatcttcgtcgaaaatctttcgagcatagtccgggtcaaagtccagaattgcgttttttagggcaggtatatttattttcggctcccacgtcttctttgacctgtaatccagcagttcatagagggggatgcagctggcctcatatctgtaaaaccggaacccgcaggtgttgtcaatcccacttttgcggtcacgctctgtaagctgagccaattccagcgtctcatcgcgcaaatcatcgcccatggggtaggctattgccagtacccacccggcgtctcttgtttcgagccaataaagcccgttccacagcttttccaatctgataggctcaccccacggagtctcgtccggaattggaaattctccaaaatattctggacagacttccatccctcgcgcttcctcttcaatcaaggtctcaccctccggcaggggcaacccatgatctgtaagatatctgctgctctcatagtttacgacgtgtctgcctctgtcaaaataatcctccagttgaatttacatttttgaaaaaatattctcctttattgttgtctaggggcccactagatcaaacatttaggagaaattttatgtcccatacgtgtattcgatatatggatgacaacaccggtcgagatgtatatatcgtcaagaccaaggcatccaacattgagcttgtgaatctcaccagctcttcttaccccaagggcaagaccatcaaaaactctggatactatggaatgaacgcaagttggtatgaagaaatcaaggaaggtagcgatatttattcctgtattctcaatattgcatatcaggatggaaagcctttgggtgccctgtcgcagtataaatacggtcagaaaaatcgggttggcgattgtctgatttactataagaatgggtctgtatattatgcggagggggttaaggactccagtgacagccgtgtgccgaagacatctgggtcttgggctcagggcggcatgggccttttcctgggtaattctaactggctctctctttttagaaatcaaccgatgaccaccgaggattattccaagggaaccgctcccagatctggcatggtagtaaatacgaacactaaagacgtatatctgtttgcggttccagttgcttctacagatttgatctctttccgccaaatcattatggactatttcggtttgaaggagggcgcatctaactcttatataagagccattcttctggatggtggcgcttctactgaactgtatggcaatgatttttatgctcatgcaacgattcagcataagattcctcagatgatttctgtggggcaggcttaatacagcacatggggcggggcaaatttagccccgccctacaaatattttcatccaaatttcgaaaaatattgcaataaaaaatagatttcgaaggatcggaacgatggtattcagagacacatcttcaaggggaaaagtgctacatatcccctggaatcttaggtgccccgaccgagtgacccagagattgctgtctaaaggtacggcttctcggtcatcggcacatgtcacttttatcgtttcgccctcgacctcacatatccaccggtccccatccgaagtcaagaacccctgataacaaaattgtgtgacatcttgtgccaagacatccggcaatatcgcattttggtatgtctgttcctgcgcggccttaaaagcatcgagtacaaggacctccccacgggtggtcagaagcagatatttcagtcctcccacataggaaacgtcctgaatctgtgatgcgatgcattcggggcgatagagcgctccaacgctgggggcgaccgaagcctcgtttccccaaacatagagatcataattcttatcgatggcaaatgtcgtatcaaaccaggaaaatgttgcacgtacattttccatcaatttctgtggatacgaagcgctgtcctcgaccctacgatttcctacccccatctggcctccgctgttatctccccatacccagagtgttccgtcggtttttacgaccgaaatatgagaggagccgacagcggcgttttcaacgccatccataattctgactggacgatcaaagggaacacgtctctcttgtaaaaggagactgaaatatccgccccatccccacaaggtatgagaatcgtcaagggccagggaacagtgccttcgattggaatatacctcgcttacatgggataaaagtgttttacgcgcccaataggggtagacaggcatggctccattccccaccagaccattcgtattccatccccaggtgatgaggtcgccgtttggcgcaatcaaacaataggagtcgtaaaaagtagtgatcgcctggtttgcggcaaaagaatcaaatttcgcggggaaaaaattgagaatcacgaatgtgatgcagagcgccaggtagaagcatcgccggatgaggaaatatttttttcttttgcagagcatgaatacggacaccctctctctatgtgcttttattatatataacgcagaattaaatccaaatgcaacagtacaatattgattaattcatatattccctttcactatcagaaatggtacctcggaagtctgaagcaacaccgattatgactgctataatgtttcgatataagcacgggcccagaacctaagttccgggcccttactttatcctacatttttcagacacttcacacccttattcgatttccttaatatgggtggccaggtactccatttgactggacagtgcttggtagcgggccgccagcgcctcatcgctctcactgaactctaccccgctgggggcgcggacaaagaccgcgaagtcctctgtctggagtgcccgccggctcgccccggccatcactggccggtcgtcctccgcccacacaccgggatagcagtcgatgtaaaacagggccccgtggccctccttctccagcgtctcccggtgatagatcgtgatgcagttcccaccattttggtgcggcagatcgtactcctcctccagctggatcaggccggcccattccaccgggaactcgatggtgaacccaagccgctggttcacgtacaaaagagcacttgactccaccgggagtgcgatccctgtcacctcgttgctgttctcctccggctcctcttcgatgatatgggcgatgctgatgtcgctgctatcctcttcgtttacaggggacaactccgtctggccgcatgatacacaaaatgtcagcggcaacatgacagcaaccagtatcaggtattccctccacgtcccagccgatattccgcccttctgcttcattcttttcacaactgcccacccctttaacggaagatgattgagcctttctattattatagacggtcagttttcccaagtgcaacatatcaacgttatttttctgttttttgaccgcggatcgtgctgcagcgctctcaaagactgcctttgccccagagtagggaccggcggacgattcgcagcagcaaagcgggcctggatgccagtatgtgcatccaggcccatctcttttgtgtttagaagctttcaatcgtggaatacgaggtgccgtcttcaacaagctctccatccgaatcatagatatctgcggaaatttttagccggtagtcatagccgcgggaaacgaactgccctttatcaaaagaaactcttcttccgctgtcactccaatccatgatggtcgtccaggaagtccccttcttctgttggagttccaataccacctttgcgtcgtattctgactgcactgtacaggtcccttggcaagaagcataaccgctgctgctgattgttaagcccgctgttaatgaccttatggccgcatatctagctgatatcacggtagacattgacagaagcacacctagtgccaacaatacagcacagaatctctttgcatttttttgcatcttcaccatttgacactccttcttatttttgagctatgtttatagtaataaggtttgaaatagagtataatttgcaatttatgtttcccaatgcaccccctcagccaaggaaattatctcctctgttgtaggggcaccatccgctgaaccagttgctgtgatctggataatgaattgattttcctcatcgatccaaaacaggatttgactgtaaaatagattgggatcttttatgtatagtgtcgctggaaatccctgaatttccaaactggtcacggatgaatcctcggaatcaatttgttgggagtaccccccagaatatctaattacatccacatcaatggcatgtcctgctccatcatacagtgaaagtccacgtgttccatttgttctggaccaaccatcatcgccaacttcatagccttccggaatccactcaaagcctactccatagtaataggtccaatcttcgttctgttccgcctcttcgggggtcggatctcgtggagcgacttcgtcttcccctttgaacgtgagttcggtgtaccggtcataagtattgatcacggcgttgagcacacccagccggaactgttccgatgccgccattgcggtcgtcagcagcaccaccatcagcataacggcaacagagacccgacgcacgaccttccatgtcacctttccaagttttttcgccctttttcgattaaattcccggcgaatggttgcctcacagcgccgccgtgcggactccggcacctctgctgccggatctgccttcaaccgctcattcagctccagggcctgcttgccctcctcctcggccactgaatccatcaacagggcaaacagagcatcttcatactgctccgtcagccgctcgtggttagtcatcctcttcgctcctcttcatgatgtccaacaattttcttctcgctcgggtcaatttcatccgaatgctgtcaggcttgcatttaaagtccgccgccaattccttgtcactctgagccaggatgtatttcccctccaaaagggcacgctcctgaggttccatgtgctccagtccctctttcagttgccgagccatctcctgcctgattatctcctcctctctgatggggatcatataccggcgcagggcctcttcccccaatgcatccaggctcaggatcttgtctttcccctttgttttctcccgaaggatcgagattgctgtgtttcttaccgtagttgcaacatacccggcctgagcagcctgggcaagcccagctagtctctcctgcttttcaatcagctttttcaggctttcctgtaccacgtcctcctgctctgtccggtcgtcaatataccgccttgccgtggcaaacatcagacgttcatactcatagtaaagcccggtaataaattcctgtttttcctggtagccgctcccatttctttcttctctctctatttccatttagaataactcccgttttgtatgaggtcttttcctttcagcatataagacctcttttttgcaaaaacgcaacgcagcttttttgaccgcaattagttttcttaattaaaatattggttattctaaaattataccattaaatatttcgttttcaattagatttctaaaattaaagccctctatattttagaaattatataataaaagcataatttatcaaggaggggg

SEQ ID NO: 13562 - DNA, 4703 bp, Unknown
  gut microbiota DNA sequence
tgtttgctcaggttctccagtatggatttgatggcgtaagccaggatcacggcaatgatctctgtgacggctttcccggatagctgttctgcgatctgctcacggcccagataggccagcagataggagcaccacacccaagcgcagccattgcacaggcacagccagacggtggccttcatggtctctgtgcggccccttttggaccggtgggtggacagccaccacagccccagacagaacacgcaccccagtgcgaaggccgctgccgcggccaggatcacagtgctgctcatgtccggacctccgattttaagtcccggatgtcgtgctgcacctccgtcatctgcccctccagcttgtaggtccgctccaccaggctgttgtgggcggccaccttctgctccagctgctcgatgcggtaggtggtcagcttgttggacaccaggatgcctccaaaggtccccgccagcgtcccgatcagcgacatccccgccacagccagcgtcgtcagatccatcccctctccccctcctttctctgaaaggcccacagcgttctcctctccaaagctctgcccgcctcggcgccccctaccactcccagccccggcgacaaaattgtatgttcccgtcaatccaatttcacaaaaaacagcagaaggggcgcacagtgtgcgccccttccaaacgatcgcttccatcttgtttgggcagcttccccttgtgggagagtggcacggcccacgctgtgtcccccaaaagcctttccctcgggggaaggcgtcacggcggatgccgtgacgaatgaggtggcgcccttccacccgtcccacgcgggcggaccatagaggtgcccgccctgcggggcgggtccctttctgaacgtccagaaaggggccaaagagacgccgggggacgctcccggccccccggtacaggacacaccgagcggagctctcctggacctgagcggcgcggcaaggctttcgcactgaccagcgtctcgcgccgctgccgctgatgccctgcgtcatttgggtcaatgcgctgttccggctttgcgcctggcgtcccgggcctgggcaggcaggggggttgacgtttccccctggtccccccgtttgcaccgtgtaagaggaacagacccgaagcaagtaaaaagggaccccggacccatttgggtccggggtttcctctcttacctggtttctgttatctgtattcccttatttctcggtcagggtcacatcaacatcgcccagtctaaactcggcgtaggcgcccagagtggtgctggcagcctcgtccacagtcttttcaggagcggtcccactggagacctggatatcaatcacagttccagtagtggtggtcttgccagttacttcaatgacggtgccgggcaccacataggcggtcacgtcgctaccgctcggagcaccaatctcctggtaacggtcagtcccggtccggtagccagcagtcgcaatcttattatcggtgagcacgaccttagtagcggcactcagctcgatattcttgtccacagtcacatcactggaaacagcggtgctcccgtagataacgccggaggtggtatccagaatgtggtttgcaccctttgcggtgtcgtaatccagctccttggaatcaaccacatagtcaccgtcagttacggtctcaccggtggtgacgaccttgatggaatcaataccgttcagggtaatcttccaggcggcgttcagggtgacgtcttcattgccgaccttgtagccgtcagccacgctcttgccagcgacagcggtctcggaggtggtggtggcgatcacgccggtaccctcggaatcatccagagtggtgaccagggtctcgccaaccttgacgtagtcattattgctgactgccttgccatttaccttgacagcgctgctggagaaggcggatgtatctaccttggaagccgcatacagatacacatccgcgctgatggcgctggagttatccagcacctgagcgctggccttggtgccggtcttggcggtgctgttgctcacatcgctgccggtgaccaggatcacggcatcggcatcagcggtcttgaccgtaaacttctgggcattgtcggaggccttgacgtaccagacgttctcgttcttggaaacgggggtcacttcaccggagccattctccaccttgctcagggtcacgccctcgcccacgtggatggcatagacgctgaccacatcagaggtgctcagggtcatgtcctcgttcacggtgagggtcaggaagccggccttcttcacctcgccgatgaagttgccctggctgtcctgcacctgggcgccgacagtagagaagctggaatcctgaatcagcagagtggtgccctccgccacctggtactccgtgccgaaggcggtggaagcactggaggggatgagagtcttgccgtccgcgctccagaccttggcgttgttcagggtgctgtccagagtcagggtacgggtctcaggagccgcaggctcattcttcagggtaatggcgatgtcggtcttgtccttcaccttgaagctgatggcgacagacttcccgtccgcggctacggtgtagtcagcggcggcgatgccggccacggtgtcgatcagcttgccatcgggggcggtgtaggtgtaggagtaggtctcgccagccttcagggtggcggcggcggcgctcacggcggtgccgtcaacggtcagggagatggccttgtactcggacttctcctgcttgacgatgtacaccagctcggcggggtcatcgctgtcgtcgggcttggcaacataggcataggtgtagtagtcgtcgtcctcttccatgtccttcaggtcgccaacgcgcacgtcagcggagctcttcaggtccttgccgttgttcttcagctcataggtggccacaacgaagatggtctcgctgttggcggtccactggtcggcgttgctgtcgcccagggagaaggctctggagcccaccacctcggggaccgcgctgaccgcgatcttgtccgcgtcggtgaccacgccggagccgttggtgcggttgaccacatacaggccggacttgccggtggtgatttcctggtgggcatcggcggtgaagatcagagtggtcttctcgccgtccacatacacggtggcttccttgtacatcttgttcttgtcataggactcataggcttcccaatcagccacatagaagtaggtcttgttgctgttggaggcctcgccggagtagacgaagaccacgtccagggcgccgtcgctgttcttgtcgatggcccagaacttcacaggatcggtggcatcgttgtccacgtagtcggggacgttctcgaagccggtgtacaggaccttatcatcggtgtcgatgaaggcggtcttctcgtccacgatgtacttggtgccgttcacatagatgaaggccttgtcgctgttgatggcggcggtgttgtttccgttgccgacagcgtgatcctcggtatccttgtagttgttgtcctcatagaggtcgccgtcatctcggtcgttcacgttcgcgtagggcaggatctgacgcagggtgtagacgtcgtcagacacggtccaggcgaagacgtgctcctccagcatggcctcgacagcagcctgggtcatggtgaagtcctgtctgtcggagtgcaggtcgatgtactcgtcatcgatctccacggtcttggcggtgccgtcggtgaagacgaccttggcggtgatggtcttcagggacacgtcaacggcgtccacatacaggtagttggcatagtagtcatccagggcgatgaagccgatgacatagccgttggggtccaggaacaggcggtagccgatatccagggtggggtgcttctcgttgatgccgtccacatcaccctcggtccacctggagtagttgtactggttgccgtcgtccagcttgacgtagttgccctgatcctcctcaggatcggcgtccttcttgacgcgggtcacagtgccctcggcggtggcgggatcgttgatggtggccacgaaggcgtcgccgtcctcgtccacatccacagtgacgacaacatagtcgtcctcagcgaagcccttgcagtagatcttccgggtgtccacggagtcgcccagggggtcctgggtgcccagcatgcggacggtggcgaactcgccgtcatcgtcggagcggatgtcggtgatctcggccaggtagtagttgatcttcaccacggtgacggtctcgttgacctcgtcaacatagatctcggtggtggcacccttgtcggtgtactcgtaggtggggtccttttcgttctcgggccggccggcaatctcctgctcggcgccgtccacataggcgacccagtcatagacatagtcgcccttctcggtgccctcgacgaccgtcttgcccaggtccttatagatcacgttctccttggtcccggcagtgtagacatagtcgggggtgtcggccacggtgatgatctcgtcatcggaggtcatcttcacgttctcaggcttcaggctgccgtcctcattgaggccgtaggagtcattgccctcggtggtggcggaggtgccccggtaggagccggtgccccaggtggtgccgggacggccgtaatcggtgttctcgttggtcttgtagaccaggtcgaagttc

SEQ ID NO: 13563 - DNA, 145 bp, Unknown
  gut microbiota DNA sequence
atgtctaccaaaagtctaccaaaaaagggcggcgggggcctggagtttcagggccttgccgttccttctgtttttgcgtgtctaccaaatgtctaccatgtaaactttttaggcgtgatctcagggatttttcccctgatcttcc

SEQ ID NO: 13564 - DNA, 21467 bp, Unknown
  gut microbiota DNA sequence
gaaggcgtccatgccggagctgttggaggaggctgtggagctgggcctgacggacggcagccgcccccgggatcttatgacccgggaggagggcgcgatcatggcccgggcagcggcgaaggccagataaagcaggggagccgccccaatatgggcggctcctgacatcaaatttgacatgattttatatgggtaattttgatgctaaataatcatccaattagaaaaagaaaaattagaaaagccttacagctcaaggggggaggcggagttgacaaacagtttcgaagacgcacctcaagtctgcgccccaacccaaatcgcgacccagcgtaagcggttgcggtctggaaaggaggagcaagggggcgggcggatgacgcttttttgtgcgtgagcataaaaaagcgccggagcaaagcggactttgctccgacgtggtgacccagcggagattcgaactccggacaccctgcttaaaaggcaggtgctctgccgactgagctactgggtcatgaaatcaatcaaacgaaaaacaggactgcctccgcaactgccggaccagaaaacacagaaaaaagtggcagggatggctggactcgaaccagcgagtgagggagtcaaagtcccttgccttaccacttggctacacccctgtatctccgtcagatggggagaaattgaaaaggcaaggaccggagccgacgctccggcccttacgccttgaggtcatatggggtgggtaaagggactcgaaccctcgaccctcggaaccacaatccgatgctctaaccaactgagctacacccaccatataacagcgacagcagagggaagatggcacgcctgaagggactcgaacccctggcccactgcttagaaggcagttgctctatccacctgagctacaggcgcatatggagcgggtgatgggaatcgaacccacgcgaccagcttggaaggctgggattctaccattgaactacacccgcatgggcgcctcactctctgtgtcagcttgaaaatgataccacatggaagggcgcttgtcaatcccttttttcgatttcgccctgcggaggacctccgcagggcgaaacaaggatcactgggggtggggagcggcgggctgggaacggcggaccagcacccactggatccggtggtcagctacctgctccacctggaggtccaggccacccgcctctacatggggacggctcccatcttccggaatggtgcggaggcagctgagcaccatcccgcccacggtgtcgtagtccgcgtcctccgggggatcgaatcccagctcttccgccagagtgtcaacgctgaggccgccgctgcaccgccagacaccgtcctccagatgctccagctccgggggctccgccgggtcgaactcatcgtagatattgcctacgatctcttccaacagatcctccaggctcacgacaccggccaattcgccgtactcgtcgatgaccaccgccagatgtacctttttgtgctgcatatcccggaagaggtcgtccgcagagagagtctccggcaccaggtaggccggacgcatcagctcccgcacagtgcggtgccgggaagaggccatatccagcagaagatcccgggcgttcaggatgcccaaaatatcattgagatcgctgccatagaccgggaagcgggacagcccggtggcgcggatgacgtccaggacctcgccgggcggggtgtccacctgaatagcggtgacatcgcctacccgggtcatggcgtcgctgaccgagaggtcgccgaattcaaagacgttctggagcagttccttctcctccgcatcgatggctccgttctcgttacccaggtcgatcatcatgcggatctcatcctcggtgacctgttcctcctcgtcctcggtcttcatgcggagcagacggagcactccattggtggacaaggagagaagggccaccacaggccgggcgatgaaggcaagcgtggagaccacccggcaggagagacgtgccatctccagggacttctgcatggcgatgcgtttcgggaccagctcgccgaagatcagagtaaagtaggagaggatcagagtgatgacgaccactgagaaggtatccaccacggagatggggagggcggtaaagccaagatcctcacagatccagcggaccagatactcggagaagctgtccgccgcaaaggcggagccgaggaaaccggccagcgtgatgccgatctggatggtggagaggaagccggctggctgctccagcattttcagcagcctgggagccagtttgtccccgctctcttccaacatccgcagcttgtttgcgttgagggagatcaccgagatctcggtagccgcaaaaaaggcattgatcaggatcaggatgacctggaccagcagttgtatggcaatagttgacacggatcgttcctcctcaaaattggacatcaggatgcaaaaaagcacagccggccctatcctggatagggcagctgtgcttttttacagtaataaatcgggtcgggcgcagtcgctgtctgtgtccataaacgcggataactccttcgagccggtccgaccccgaatgggagcagccggcgatcctttcccgctgaggggcgggatgataaaaaggataaaggaaagagaggcctgcgtcaagagaaaagaggcggaattaacggcatttttacagggagagatcaaatcttagcacagagcggcgtcacagaagccgcagcagtccacgccgccgatctttttgaccagaggcgggagatagtgctcggtctgggtgatgcagcgggggttggtacagacgggcttggttccgatctccacagcgggaggagcgtcatcccggggttggagggccagatgctccagaagggccatccgggcaaacatcccgtagcgggcctgctggaaatagacggcccggggatcgtcatccacgtcgatggagatctcatccacccgggggaggggatgcatcaccagcatgctgggtttggcccgttccagcttgcgccgggtgaggatatagattcccttgttgcgctcatactccagggggtctacaaaccgctcccgctggatgcgggtcatgtagaggacatccagctgggggatgacggactccagaccggtgacctcggtgaaccacatattgttctcacgcatgaagacccgcatatattcgggaacggccagatcccggggagagatgaggaaaaacttgatatcccggaacttggccatggccttgatgagggagtgtacagtgcgtccgttcttcaggtcgccgcacaggccgagagagaggccgtctacgcccccccgcaggcgggtgatggtggtcagatcggccatggtctgggtggggtgcatgtggccgccgtcgccggcattgaccacggggacggcggagtagagggaggcggccttggccgagccctcccaaggggtgcgcatcaccactacatcggcgtagccggagaccatcttgatggtgtccttcagggtctctcccttggcaacggaagaggagttaggatcggcgaagccgaacaccgtcccgcccaggcgcagcatggcggtctggaaggagaagttggtgcgggtggagggctcgtaaaacagattgcacgacacccggcccttacacacgtccacaaattgggatgggtcatccatgatctggctggcccgggcatacagggcgtcccactcatggcggggcaggtccccaaaatcgatcaaatgacgcatcgcgctccactctcctgttatccgtattcttcgagtaatcctaccacaaaccgcccttttccgcaaggcatcatggaaaagtctgccccactttttccaagaatggcctcagcttccgggaaaacagaccgcaggcagaaaaaggcccgggacctggccgttaatgacaaaatttgcccgcatgaaagccactcattttcgctaccctatgtagcagagaaatggagggctgacctttgatctgggtttggaactttatcctatacagctttttcggcttcctgctggaggtggcctacgcccgggcaactggagggcggggggaccgaaaaagcctgcttgtgctcccgctgtgcccggtgtacggcgtgggggcctgcctgatcctgctgctcccgcggactgtcatccagaatccctttacgctgttcctgctggggggcctggcggccacggcggcggaatatgggatggcaattttgtacgagcggggactgggcgtctccttctgggattataccggcctgccgggcagcatccaggggaagatatgcctccccttttccctggcctggggggcgctggccctcccactcatctacttcgtccatccggcggtggcgcggctgaccgccctgatcccgcctggggtgacctggacggcggccgccacggtggcagcggacatggcggtgtctggggtgctgatgaaggtgactgggaaccgggactgtctgcggtggtatcaaaagcgggcggaaaaggcccgggagggtggttgacagccccctgagaaaccggtacactgaagctgaccgcggcaagcgggatcggagctggaaggactggagggccggaaatggaggcaatttactataccgtgagcaatattaatggagattatgccgaaatggtatcggatgatgggcagaaacactccctgaccatgtttctgctcccggaggggaccacggtggggagccggctgaagctggagaactttcaatggagcctgtgtggatgaacagagcggtccgcggatggaccactctgactgcgggaaaagtcctcaatttgctcgccgcagcccttgctctgcaagggctaggggatgtgattccattccaggcgggctgccgccccctcgagctctccggtctcatcctgaaacatctgcaactgaaaaaaggggattcgaaatatacagggccgcggatgctgtgcatccgcggccctgtatatttgacgggaaaaaggatcacttattgctcctgcgccagatgtgcattttttcggcgtcggcaatgagctgctcccggaagtcggggtgggcgatggagatgatggcctccgcccgctcccaggtggacaggcccttcagattgatcatgccgtactccgtgaccacatagtggccgcaggagcgggggtcggtgcagatggagccctgggtcagggtggggacgatgcggctcttgacagtaccgtccttgccggtgacggtggaggacatgcagatgaagcttttgccgccgttggacaggtaggcgcccatggcgaagtccagctggccgccggtgccggagatgtgcttgatgccggcggactcggcgttgatctggccgaacaggtctatgtcgatggcgttgttgatggagatgaagttgtcgatctgagcgatgacccgcacatcgttggtgtagtctaccggggcacccatcacgtcggggttgcggtcgacgtagtcatagagcttctgggtgccggcggcgaaggcgaagacctggcggcccttgtcaagggccttgtgccggccggtgatcttgccggcggccgccatgtccacgaagccatccacatacatctccgtgtggacagacaggtccttcaggtcggactgggcgatcatggcgccgatggtgttgggcatgccgccgatgcccagctggaggcaggccccgttgggaatctggggcaccaccaggttggccacggcccggtccacgtcggtaggctcgccgcctgcgcccagctgagccacgggggggttgtccccctccacgacataggtcacgtcctggatgttgatctcggtgccggtgaggccgtacacccagggcatattctcgttgacctccacgataatgcacttggcacgggacatcaggtcggccaggtgggaggccgccaggccgaagttgaagttgccgtgggcatccatgggggtggtctggagcatcaccacgtccacaggggccagattctcccggtagaagcggggcagctcggagtagcgcatgggactgaagtagcccatgcccttggtgatgatcttgcggtcgatgccgctgcagtgccaggagtgccaggtgaagtggtcgccggcgtcctccgccttggcgatctcgggcatccacatggtgacgccgccccggacctttacatcggtgagctcatccttgcgggcggcgagagccttgtccagggcaatggggtggttggtgcaccaggtgtagtccacccagtcgccggatctgaccaccttgacggcctcctcggccgtggtcagcttctgctggtacattgcttgataatccatgaaataacctccaaactcatctgtatttgcggtcagatatccaggtaatagggcttcatcaagctttcctgctcggtggagtccttgggatgtccggtgggacggggcgggtcctggaaggagcggcggcggtcctgcccgcggccctgggaggactttttatgcttggacggcgccggcttccggctctccgcctggggggcggtgtgggcagagcggcccttctggccctcactcttctggcggggctgagcggcctgtccagcagagcgctttcgggggcgcccgtgctcctccctggaggataccggggagagagtcagccggcggggagccagcagacgggcagtggcgtccatgatccggtccccagccagggggtcggggcggtcgaactcagtgcagggcatggcgctgcccgtctccaggcgggtgccgggccgggtcagcttggggcgggcgggagcctgagcgggcagcggggactccgccggggcggcgggcgcctcccccttggacttgctccgcctgcggcggcgcttcttcttctctccgccctccaccgtggcctctggggacggggcagaagcctgagcggacttctcctgtttctcctgagctgcggcctggcgggcggcctcccgctcccggcgcagctcacgggcggcggctcgggcctcggcgtcctcctcattgatagtgcggccgttcttatcctttttgggaagctcgaagacctgcatgggccaggggtgctcctctaccacggggatggagcggtgggtcagcttttcgatctcccggagcagaggtttctcggagaagtcgcagaaggcgatagcctcgccgccacggcccgcccgtccggtccggccgattcggtggacataggtctcaggcacctcgggcagattgtagttgaagacatgggacagctcttcgatgtccagcccccgggcggcgatgtcagtggccaccagggcctggagtttcccggccctgaagtcggccagggcctgctggcgggcggtctggctcttgttgccgtggatggcggcggcggtgatcccgtacttgctcagctcccgggccaccttgttggccccgtgcttggtgcgggtaaagaccagggcgtttttcaccgccagctcctggatcagctgggccagcagccgggtcttattgcccttgtccacgaagtacaccgactgccggatggcctccacaggggaggagaccgggtccaccgccacccggacaggggagcggaggagagagttgaccagatcggcgatctccggcggcatggtggcagagaagagcatggtctgcttccgggcgggcagccacttcaggatcttcttcacgtcgtggatgaagcccatgtccagcatgcggtcggcctcgtccagcacgaagatctccagctgctccagatggacgaacccctggtcgtggaggtccatcagccggccgggggtggccaccaggatgtccaccccccggttgagggcctccacctgggggttctggcccacaccgccgaagatgacagcgtggcgcagggacagatggctgccataggcctggaagctgtcaccgatctggatggccagttcccgggtgggggtgaggatcagggcgcggatggggcggcccttcaccggggcggcactgagccgctgaaggatgggggcggcaaaggcgcaggtcttgcctgtgccggtctgggcacagcccagcacgtcacgcccttccagggcaggggggatggccttctcctgaatgggggacggccgggtgtagccctgttcctccagggcggagaggatgggggcgatgagccctaagtcgcgaaatgtcattcagctcttcctttttcgtgatccgggcgcggtcagcgccgcgccgggcccccatttccccgggggctggggcgggctgccgggatcaccggcggccgttcagaagggccaggaccatctgagtggtctgggccaaggtctgcccaggaaggcagtccaccgtcaaatcggcatagcgctcgtagaggggggcgcgctgggccagcacgtccgccagggtctgccccggctccatggcgatccccctggtagccaggttctggatgcggctggtcagctcctccatagggacccggagatagaccacggggcccagctccttcaggtgggccatggtcccctcccggcagacggcgctgccccctggggcgatgacggtgcagcggcagtccacggtgcggatggcctcctcctccacctggaggaagtgcttcaccccgaactggtccaggatgtcctggagcagcaggccctcccgctgctggatcaccaggtcggtgtccagaaagccgtagcccaaggctttggccagaagaacgcccacagtgctcttgcccgagccgggcatgccgatgagaatgatgttgtccaaagcgtgatcctacctctgtacagactgatatccgaattagtttaacacaaaaacccggaaaaaggaaggggaaatgtacgcccagcaggataaaaacaggagcggcagccctgaaagctcagggctgccgctggattcagtcctgggggctgtcccaccagagggcctccccggccgccagggaccggggaacatccaggatacgctggttggcactgccacggaaacggaggcggatgtccttctgctccagaagaaaggggccgtccaccagcacatccagctcatgaagaagttcccggtccagcggacccacccggccggcggccagctcctcgtagaggtagccggtgtagcaccagatatccctgccggggagctcctgccgcacccggcgtaccagggagagcacctccggctgattcgccggggccatgggctcgccccccagcagggtcagcccgcggatatagccggggcggagcagatccaggatggagcggacctgttcctccccgaatccctggccatattggaaatcccaggtctccggattgaagcagccggggcagcgatgggggcagccggacacaaagagggagacccggacgcccggtccgttggccacgtcaatggggcggatgtcggcgtagttcataaaaacctcttactcatatgtatctccgccccgcagggcagagatacatcctatatttttataggtgcagcacccgggacttgatctccttggtcttgcccacgttccagtagttctctcccaggtagccgcaggtgcggcgggtgacgttcatcttggcctggtcggtgttgtggcacaccgggcactcccactgcaggtcgtcgttgatggtgatctccccatcatagccgcagcactggcagtagtcgctcttggtgttgaactcggcgtactggatgttgtcgtagatgaaccggaccacctctttcagagcctccaggttgtggcgcatgttggggatctccacataggagatgcatccgccggtggagatcttctggaactggctctcaaaggtgaacttggagaaggcgtcgatgtgctcccgcacgtccacgtgatagctgtttgtataataacccttgtcagttacatctggtatcgtcccgaagcgctccttatcaatgcgggcgaagcggtagcacagggactcggcgggggtgccgtacagggcaaagccgatgttggtctccttcttccaggtgtcgcaggcggagcgcagccgctccatcaccttcagggagaaggcctgtccctcaggggtggtctgggagcagcccttcaccagcttggtcacctcgtacaggccgatatagcccagggagatggaggagtagccgccgtagagcaggggctcgatgggggcccccttgggcaggcgggcaatggcgccgtactgccagtggatggggctggagtcggagcgcacgttcttcagggcgttgtggcggcacatgagggcctcgaagcacagctggagccgctggtccagcagctgccagaacttctcctcatccccccgggccaggatgccgatctggggcaggttcagggagaccacgccctggttgaagcggccctcgaacttgtagttcccattctcgtccttccagggggagaggaaggagcggcagcccatgggggagaacacgttgccctcgtagttctcccgcatcttcttggcggagatatagtcggggtacatccgcttggcggagcacttgacggccagctcggtaatgtagtcatacttgccgcccttcaggcagttgtgctcgtccagcacgtacaccagcttggggaaagcgggggtgatgtagacccccttctcgttcttgatgccctccagccgctggcgcagcacctcctctacgatcatggcgttctcctccagataggggtcgccttcctgaaggttcaggaacagggtgacgaagggggactggccgttggtggtcatcagggtgttgatctggtactggatggtctgaacgccgctcttcagctcgtccttcagccggtcggccaccagtcgctcgatggtggcgtcgtccacctgaccggcgcactcataggtgatgtgctttctgaacttctccttgctgcggcgcaggtacttgcccaggtggctcatatccacggactgcccgccgtactggttggaggccacacaggcgatgatctgggtggtgacggtgcaggccacctggaagctcttggggctctcaatgagcttgccgttcatcacggtgccgttgtccagcatgtccccgatgttgatgaggcagcagttgaagatgggctggatgaaatagtccgcgtcgtggaagtggatggctccctcgtcgtgggccttggagatgtactcgggcagcaggatgcgccgggtcaggtcccggctcacctcgccggcgatgtagtcccgctgggtggcagcgatcatggtgttcttgttggagttctcctccgccagctccttgttctcgttgcgcagcagggagaggatggactcgtcggtggtgttctgcttacggaccagggcgcgggtatagcggtagatgatgtaggtcttggccagcaggaacttattctccgctaccagggcctgctccaccatgtcctggatgtcctccaccaacaggcgctggcgcctgcgggcctcgatgctgtcgatgatggagtcgatgcgcgcctcctggatgcggtcctcctccgggacctcggcgttggccttttggatggcgagcttgatcttgctgcggtcgtagtccacgatggtcccgtcccgcttgatgactttgatggcgctcatggcgtactcctctcccttgaatcctttgtaagtgggtgagcgggggctggggccgcccgcataaaactctgccgggccctgattataccataagcggcatgtggtgtccactatatcttgtgggtgatttttttaaaaacaaaaaaagaccacaaaatctgttttgccagggaaagggcggaaaatcggggggtgcgggagttttccgccggcgggaggttgccccggcgggaaaaacgtgatatactggactcaaattttcagcgttttgacgattttcatctgggaaggagagacccatgggagagcggatcgcagtggcgatgagcggaggagtggacagctcggtggcggcatggctgctccagcgggaggggcatgagctgatgggggtgaccctgaggctgttcgaccgggagacgccggaagggacatgcggcgccagtgacgacctggcggacgctcgggcggtggcggagcggctggggatgccccaccaggtgctggactgccggacctgcttccgggagcgggtgatccgccccttcgcggcggcctatgaggcgggctgcacccctaacccctgcgtggactgcaaccgggggatcaagttcggggagctgctccgcaggtccctggagctgggggcggaggcggtggccaccggccactatgtgcgcatggagcgggacggcgccaccggccgctgtctgctgaaaaaggccctccacccggagaaggaccagagctacgtgttgtacagcctgacccaggagcagctgtcccgcagccgattccccctgggggggctgtccaaggaggagatccgggccattgccgcacggcagggcttcggcaacgcggagaagaaggagagccaggatatctgcttcatcccagacggggattatgccgctttcctccgccggtacatggggagggagtaccctccggggcccttcctggatcagaacggcaggcgtctgggaacccatgaggggatcgtctcctatacggtgggccagcgcaggggactggggatctcctcggaggggcggctgtatgtgaaggagctgcggccggaggacaatgcggtggtcctgtcggacaacgccgccctgttcacccgcgtcctgacagcggaccggctgaacctgatccccacagacagcctcagtgcgcctatccgggccaaggcccgtatccgctaccgccagcaggagcagccctgcaccattgagcagacgggaccggacaccgtgcgcgtggagttcgaccagccccagcgggcggtcaccccgggccaggcagtggtcttttacgacggcgacctggtgatcggcggggccaccattcagaaaggaagagagtcatgagcaaaaagcgcagccagagaaagaattccaactacaattaccgccccggccagaaggtaggagaggacccccaggcgctccaggagaacagccggaccaagaaattcagccccgcggcccggaatctgctgttcgtggacctgatcttcctggcggtgtgccaaatgatggagtccggcggcctgctggacgacgtgctctctgcgtggctcaccctggtgggcctgatcctgctgctggtggcggtgggcatccaattccagttctggcggggccccaagtccaagatccccaaggggcccaggagctgaacggcctatgaagcgggagtatcggaggagcgagccgctcttctcccagtgcgggctcaactgcggcctgtgccctatgtaccacatccgtgaggagtcccactgtccgggctgcggcgggccgggacggccatcctgccccatactccggtgtgccggtgagcacggcggggtggagttctgctccctgtgtccggattggccctgccagcggtatgtccaggagcaggccgactccttcatcccccaccggaacgcccgcagggacctggagacggtgaagcgggtgggcctggagcactaccgggagacgctgggcaagaagatggaggggctgcgcttcctgctggagcggtgcaatgacggacggcggaagtcgctgttctgcaccgctgtcaacctgctggagctggaggatgtggaggcggtcatagccaggctggaggaggagttcggcccagagtattccccggaggagcagaaggaacgggggagccgggcggctgagctgttccgggagcgggcgcagaccaggggggtctccctgaagctggagcggcagcggaagccctgaactggaaagaacgtggaaaaggtggagaaagaccgatgaatattcagtgggaagcgggaaagtacacagaaaactttgattttgtccaccgatacggtgagagcgtgctggagctggtggaggcggaagcaggaggcctagtggtggatctggggtgcggcaacggggccctgacccagaagctggcggaccgaggataccgggtgctgggggtggacgactccgccgagatggtggccgaggcccgggcccttcatcccggactgcccttccaaaagggggatgcggtcaccttccagctggaggagaaggcagacgtcattttttctaatgctgtgctccactggatcgacgggagccggcagcaggccctggcccgcaacgtggccgcccagctgaagccgggcgggcagtttatctttgaattcggcgggaagggctgcgcggagcgggtccactcgtcgctggagcgacagttcgcgcggagggggctggcctatcccaggaccttctacttccctactatcggggagtacgcccccattttggagcgggcgggcttccgggtggaatacgcggtgctgtttgaccggcccacagagcagaagacgggggacggcctggccgactgggtccgcatgttcgtcaaaaaaccctttgaggggttggagcctgccctgggggatgagctcctccgggcggcggtggaggagctgcggcctgccctgttccgcgacgggaagtggttcgtggactacgtccgcatccgcatgaaggcaaggaagacggccggatgaccaagctggccgggggcaccggtgtgcggtgcacacggagacgtggtgcggaggggagagccaaagcagtagatgaattattcctttacagaaaaggaaattattattaaatatatccaaaaattttctgaaatgtaaataaatatatgttacaatgaaagaagaaaagaagggactgtagagcctaaaaaggagatggaaaaaatgaagctgaaattgatacttttggggagcttgtccccgctgattggactgttgatttttttccttcaattacaggtgcccttccatggaataaaatacttagtgatcctggcgatcatgtctgcggtatttttagcctatttctttttctgtgcattctttttttccagtaaacaacacaaaaagaacagcctatacttttttgtgactccctttatattgttcttggtcaattttataggatggatccaaaaatatgttgtattggcgctgatcgtatcaggggtatccgcaccatttcactatgttctgccagatttgatatttccaggagacaaatatcacttaataatgagcatatttcctttggtcatttgttggatcgcgtttaaaataggggagagagtgggtatttacttcaaagaaagaatttaatttgacatttaagtcttaccacttctaacatcttaatatctgctcgtttccttctctaggcccatagatttgctgactgcgcgacctccagaacgaaaaacagaagggtatgccatctgaggcatacccttctgcgttctcgtaaagatgtgtgtgggaggaacctataaggggacaaagaaagaggagactgagaaagctgtcggcggttatctctggtactcgaactccaggtcatacagggagacgatatctccgtcctggatgcccatctcctccagtttgtcgaacagaccggactggcgcagcttctggtcaaaccagttgcgggactcgaaatccccaaagttgacgctggcaatgagctgctggagccagggggcctccaccacccaggtgtcatcgaacttctcgatggacacgctgccgttggtgtccacctcggggggacgctccacgtaggtgggctcgtagaccaccacagggggcagctgctggagctcctgggcagcacgcttcaccagctcccgggtgccctggtgggcggcggcggagatctcgaagagctccatgccctgggactccacatgggcgcgcagccggtccagcagggcggggtcctccatgatgtccaccttgttggcggccacgatcattttccggccggccagctcgggggagtactgcttcagctcggcattgatggcctcgaagtcctccaccgggtcccggccctcggagccggacacatccaccacgtggatcagcagccggcagcggtccacatggcgcagaaagtcgtggcccaggccggcaccgtcggcggcgccctcgatgataccggggatatcggccatgacgaaggagaccccctcctccacataaaccacccccagattggggaacagagtggtgaagtggtagttggcgatcttgggctgggcccggctgaccacgctgagcagggtggacttgcccacgttgggaaagcccaccagccccacgtcggccagcagcttcagctccagcacaacctcccggctctcaccgggcaggccgggcttggcgaagcgggggacctggcgggtgggggtggcaaagtgctggttgccccatccgccccggccgccccggcacaggataaagggggtctcgtcagacatatcccggatgatctcgccggtggcggcatcccggatgacggtgccccggggcacctggaggagcaggtcctccccgtccctgccggtgcggcggttgccgcccccgggggcgccgttgcccgccacgtatttccgcttatagcggaagtccatcagggtggacatgtgatcgtccacggtgaccaccacgttgcccccccggccgccgtcgccgccgtccgggccgccggcggccacatatttttcccggtggaaggagaccacgccgtttccgccgctgccggagcggacggtgatcttcgcggtgtctacaaagggtgctgccataacaggcacctccttttcagggttggaagtgacgccggacggggcccggcggcggaatgagaaaaagaaagccgcaaacgccatccgtttgcggcttttttcagcagctcaattactgagcgatctccacgatggagacctgcttgcggtccttgcccagacgctcaaacttcaccttgccggacttcagggcaaacagggtgtcatcgctgcccttgcccacgttgacgccggggtggatgtgcgtgccgcgctggcggaccaggatattgccggccagcacgaactgaccgtcggcgcgcttgacgcccaggcgcttggcctcggaatcacggccgttgcgggtggaacccacgccctttttatgggcgaaaaactgcagaccgattttcagcatgtcttacacctccaagacgataatgtgatcggggtactcctcatgcagctgggcgaagtggaccatgagagcggtcatcagcgtctgacaggtgctctcggcggtctgacccagcttggcggggagcttcagggagagataggcgtccttctgccggaccttgacggcggcctccagccccagcacgtcgttgacggcgcactcggccagacggaccgcgctggtgacggcggcgcagacgatatcctccccctccggggcgtatccgctgtggccctgcacttcaaagctcacgatgcggctgccctcggtatgaaaggtcacggtggtcatgatcaggcctggatggcgccgatctgcaccttggtgtagggctgacgatggccctgacgcttgcgatagcccttcttgggattgtacttgaagatccggaccttcttgcccttgccgttcttcaccacagtggcggccacggaagcgccctccactacgggagcgccgaaggtagccttgtcgccgtccaggatggccaggaccttatcgaaggtgatggcctgtccggcctcggcctccagcttctcgatgaacagggtatcgccctcggtcaccttgtactgcttgccgccggtctcaataatagcgtgcatgtatgattcaactccttcataacgggctcgctgtcgggggcagggaggctggctcccattttgtggcccattcaaagcggctctgatagtttatcaataggactttgatttgtcaaggggacggggagtttttttgaaaaattgttttagggacgggcatcgggaagggccagcaccgggtcgggcacagtcaccacatacttctccagcagggccaccggatggtaggacagcttggaggtgcgcagtcccgggtcgcccacgtcgtcctcacggttcaggaaggagaccccctccccggcataggcctgggcaaactggctgaccagcatctgataggcaccaaagatctcccggtccgccttctcgatgtggatgaacagggtgtcccccagcacttctcccagagagaaaccggccagacggtcctccaccatcagcaggccgcccttcatgtcgtagaggtccaggttgttcaggacctccttggttttgttcaggtcctccagataggagacggagtccttctcgtgctcctggacatagcggtccagaagggcgaggatcatgggcaggtcctcaggcacgatagggcggaaggtccaggtcccgtaggtcttgtggaagcggttgacgtgattgcgctgaccgctgagttttttgccccggaaaaacttcaggtcctcgctgcggtagagatagtcaaaggtgtcccggtccgcctgggcggtgcttccagggaaaaagtggagcattcggtcaagctcgtccttggggacggggacaaaacgcaggggcagcttgttctgcaggcagtattcggcgatctgccggaactgctccagcctgccccctcccaagggaagggtaaaggtgggacctacgccaggatagtccaccttaaaatagagagagttgtcccacagagcgtattcggtgcggtacatgtcccgccagatgaaaacggtgcccggtgtggtgtcacacaggcggctgccgctgtaagcaaaataggggcgcagccggggcaggtcctccagctgcaggggtcggaaatccagcatacgatcaagttccttttgtttctctttttgtctcgtcattcaggcggccccggtaccagccggtgacgccgtttttctttaccagggtgcccatctctccggtgcgggccacgatggaaaggcagtcccccggcacgacgggcagaaggtagtcagtggagtcctcgcaccggagcccctccgggctgtcataaagatagctggtgaggatggggagcacccgtccagtctccagatggcggcacagagataactccggtccccgctccagcacctcgacccggttgcggccccagcggatgttcagggaatcctccgaaggcgcctgtgggtccagggcccgggccgtgggcagcccgtcgtaggcggtccagctgaagtccggagaggattcctccgggatgataagggcgttgagctgaccgtccagcttgaggacgcagccgccgtcgatggagatgatgtgccgtgcgcggtcgacgatgggggcagcggaggggatgcgggggtcatacagggtgacgggccagtggcccaccaccacatacttgccggtgtgggcaaaggagtggccctggccccagtagtcgtcgtttttcatgcagtgccaggcgtccagctcctccatgcggtccagggaggggacaccgccgtggacaaagaccaggtgttcgttctccaggatggtgggcagggaacgcagccagtcccagacccaggggaaggtccggcgcaggcactcccgcaggcggggcaggtcgtcccagcggtcaaagccggcttccctggccatctggcgcaggatactctccgggtgggcaggaagatagacccggaaaaagccttggtcccacaggtcatcttcaaagaaacggaggaccagcccatcacagttgccgcagacagggagaatggtgtggtcctgggacaactccaggatatcccgcagcaggcccagactgtccggccctttctctaggatgtcccctaccagcaccagaatatcacgggacgagaaagcagctttttccagcagaccgcggaaaaaagcgcggttgccgtggatgtcgctgaccgccaggatgcgtctgctgggggccagggcggggtggacaacagtggcgagggccatgaggcgtgctcctttccgggcgggtgtggggacgggaatgggcccggtcctgatgctctaaactttatcataacacagaagctgtaacagaatcaagccaaaggggagagaaaaaacctatcgttttgcggggagtttttagcaggaaggggaaagaggagggggacggaatggcagggggggcgcattccccggcggcgaggtgggcgggccatcttgcaggggccgcctccgatatggtagaatgacctgaccggaacaaaatgagccaacagaaaaacagaaggggagcggagcgcaatgaatacaccggagctggagacggagcggctgcgcctgcggcggttcacagcggaggacgcagcggccatactggccatttttggagacgtggaggccaataccttcctcccgtggttccccctgaagtcgctggaggaggcgaggcagctctttgaaaggcagtaccagccggtctaccgggcagagcggggataccaatacgcgatctgcctcaaggaggacgacatccccatcggctacgtcaaggtggacctggacgagagccacgacctgggctatgggctgcgccatgagttttggcatcggggcatcgctgcggaggcagcccgggccctggtagagcaggtgaggcgggacgggctgccttatctcacagccactcacgatgtgaacaaccccaacagcggagcggtgatgaaaaagttgggaatggtctatcaatactcctatgaggagcagtggcatcccaaggacatcccggtgctgttccggctctaccagatggatctggacgggaatagcggcaggccacacctcagatactgggagcgatcccgggtccatatggtggagcagggcatatagccgggcagggattctctgtttacagaaagttcacagggatgacatgatttcgccttaatttctgggtatgataacaccgtacccagaagaaaactcccatttctccctctccttttacaacacacacaggtctgacaccccggtcccatggaccggggtgtcagactgttccggtacaggatggggctatttacagaaaattcacattgcggacatgatttagcagtacttctccgttaagataagaccgtacccagttttcataggatacctcccatttctccctctctttacaacacacacaggtgcagcgccccggcctcaaggctggggcgctgtgctgtccggagagacgcgtgctgtttacagaaagttcataggcaggtcatgatttcgacgtatttcttcggtaggatatcactgtacccaagatcacaaagaattctcccatttc

SEQ ID NO: 13565 - DNA, 3477 bp, Unknown
  gut microbiota DNA sequence
gtatatagtttccttattgtattagtcaagtgtaacttcaattttttacgttatatttcactttttgacggtttttagcccctcgattttgtgctattcgctgaaaatggcaggggtattttttgctttaagctgcttctccattttcggacatatttttcgccacctgttcttgtattttctcatcgctttgtttataatgataatcacatatatttttccacaaggaaggggctgtatcaggatgcactcatttggtatctttaccagcaggttgtctctggagcgagtcatggatatcgactccgagctgacccgctatgggatggttacctatctaccctatacctctcccgatcacctgaagtttttgtatgaacaaaaccgagatcgcttcgacgcctttttgttcggcggctcatatccctttgagattatcactggcacctttggccccattcaaaagccctgtgcctatttcaatgtttcagaccgggactattacaagatgattgcctgtctagctgtccaggaacccaatctggattttcagcgtgtatattttgatatcccagatatgcccgtagatttccgctctatttttcagcgagagaacatcccccttttgagtgaggcccccattgactgggactccctcgacccatacgactgggatgctcccgtaaaagaatactatttgcatctttggaatagtggaaaggtggacctaatcgtgacccgctttgccagtctggctgactatctcagcgatcaccatatccgctatctgtatctctccccttcccccgaatccatgctggagaccttccgcggtctggtcatgcagctgcgcacccagtctatgcatgattccgccgcctgcctggggctgatccgttccatcatgcccctgtccaaggaacagtgggccgcactgggggaccgtcttcaggcctgcaacaaacaattcggcacccccttcctcatctatgagcacggggagcactatgagatcaccaccaatatttcagtcctgaaagacctcacgcagcagtacaccatctgtcctgtgactgcctttctggaggcgggactggattttcccatctgtaccgcctggggctgtgccggcaacgtagtggatgcccaccgaaacgcccagcgggcgctgaaagaggcgctgctgtgcaagggctccgccgcctttatcgtgatggaggacaacaccatcatcggcccgctctccagcgtccgccgcatttcctataccgatgcgcccgatgaaaagcggctggagctcagccgccgtctctccatctcccccctctatttgagtaagatcgtctccgtccttacccagaaaggaaacgacactctctctgcggaggagctatccttctatctggatatcacccctcgcagtgctctccggattctatccaagctggaggccggcggctacgcctctgtacagttccggcggcagctcaacttgagaggccgcccggccaagatctatcagatccacatccaggacctgacctgacgcccccaaacctgtctcatccgcaggaggtactacgcctatgaaaaagatccctacatacagcgggactctgcgcagccatttgctggccgtcccccactgtatttcagaatgcagcggcatccgcatctttggccgccgcatcaaatccctggtgttcaccaccgatgtggccatcatcaagaacgtcaacggagacgccatcatcgcggtctatccctttaccccccagccctccatcgcccaggccatcatcagtgtggccgacgtcccggtgttcgtgggtgtgggaggcgggatgaccagcggctcccgctccgtccggcaggcggagtacgcagagcaccagggggccttcggcgttgtggtcaacgcccccatcacagacgagaccatcacccagatcaagcatgtggtggacatcccggtcattgccaccatcatctcttctgagatggatgtcgccgggcgtgtccgggccggagccgatattctgaatatctcaggggccgcacgcacccctgagatcgtggccaagattcgaaaagatttcccagacatccccatcattgccaccgggggccccacagaggaggacatcctccgcaccatccaggccggagccaacgccattacttatacccctccctccaccggtgagctgttttccgtgcggatgcaccagtaccgcgcccagttccatccggaataaaaggtatgaccgccgccgcttttaagctgtttttaatgctggctttctccccctttcagaatcaaatggtaggatagcgtcagtaggaaggaggaaattcaaaatgattaccctattcacgctgtctctgctctgcctggctgtgatcctggtcctgggcgtggtgctgaccatcctcagtgtgccgttcctggtcatcctgggcctgctgccctggcttctgcgcatcgccgccgcggtcctgctgatccgcggactgctggaccatcccttccgttgggaaaatctgatccctgccgctgttgcctttgggctttctgttcttctgcactgacctaaagagcaggggcggagcccccttcgtccccgctcttttcccaccggaaaaaataacagattttcttgcaaaaaaatgttgacaaatcggaacacttcggttatactaactcttgccctgttcgagacgggcagacatggcggcatagctcagttggctagagcatgcggttcatacccgcagtgtccccggttcaaatccaggtgccgctaccattacaatctaacagagcattggctctgagccatatacggcccggtggtcaagcggctaagacaccgccctttcacggcggtaacacgggttcgattcccgtccgggtcaccacctttttttgagccgtccatatggaggcatagctcagccggtagagcgtccgcctcacacgcggaaggtcacagattcgagttctgttgtctccaccaagaggaagagtgccacaccaataggtgtggcactcttcttatactgttctgagacgggaatgatttccctgtccctgtgaaacgaaatgcaggatctgcgcagcgattttctctgggtatcataagaacactgatcgttcctgttcgataagatcagaaccattgtcatttgcgtgatgtctaccaaaagtctaccaaaaaagggcggcgggggcctggagtttcagggccttgccgttccttctgtttttgcgtgtctaccaaatgtctaccagggaaactttttaggcgtgatcccagagatttttcccctgatcttcccctttttataaccaattcctcctgtgccagaagtgttgtacaggcatagtgggccaaaatgttctgggaaaggcccggtttgtcagaaaacagcgacttttgtcaatataaaaaggaggaatatccaatgagaaac

SEQ ID NO: 13566 - DNA, 21501 bp, Unknown
  gut microbiota DNA sequence
atcaaccggaagagctgagagcgcctgaggccccccgccaatatggcggggggcctcagtttgtcaaaaaagcgctcctgcggaggtccggcgcccacaggcggcggataacgtttgatgctgccctaaaagtgactccgccacttttaggcagtcgcaggccccaccaatatggcggggcctgctgcgtcaatgacgcgggttgtcccggatcagcttgactgcattgctgagggcggcgagcacatctgtgcggttctgagagtcacaattcttcagcttgaccatcatacgcccggtatccgtcaccacatactgcggggggagatggttcagcgcataggtgatcacatcaggtttacagatgtcgcagcagtagcagccgtccgcctccaagatcctatctacatgctgcagcacgatatcctccatcagattatggtaattcaagcccatttccacattccccttcttttgagaagcgatcatattcttcatgatccatatcctctgtagactagagggaggatcgatctgtaggccggaaaaagcgaggatcgctggggaaataaaaattttctgtcagcgagagccggcgggcaggatatgccggggggagtccatcacagatttgcaggcccagatgatctgcctggtgatctcgctgtcataccgggcccggtacacactgagcttggtggggagcagatctggcggaaacacggcatattgggccgggagccgggtgagagccagtgcctcggcgtccgccagacagcggggacagctgcaaaggccaaacagctttacataacgttccagcttttccgccaccaagagctgcatcacattgaagagctctgcgccgtctgacagctctgtggatgcctgctccggcacggaaggagagggagcgggagcagaaggagcgggagcagaaggagtggggggcggagtgtccaaaacctggggagaagcttctccctccgctgcggaagcgggagatgcaggagggaccggagagggggcggcagtctgctccgaggaggccagctcctcctgaagtgcggattccagcgcagtgtggatgctctctgacagcgcagcattgttgctgcgggccacctccaaaatgggcggggagagacggcgcgcagcagaggacggagcctccggcacggacatgtctgaagcagggggggcaggctccaaaggggtggggggaggtgcttccctggggggcggcaccgcgtccggctttacctccggcgtgccgccggaaagaagattcagcacatgggccgttttgctgcttcggctgtttttgcccgccatcacacatccctcccgggcccatcctgatgggtcctgcggggaaaggcggcgccggccagctcatcacacagacactcataatcctgggagggcttggagtggggagagtaatctacgatgctgatcccgtgagccggggccgccgccaccgagacgctgttacggatcttagtctggaatactctggtatccagctgttccgccatctgctgggagagctccagcatttcccgattgagattcagccggggattaaaacgagtgagcagaatgcccatgacccgcaggcgggaattataatactcccgcacactgtcaatggtctctttgatctgggagacgcccagcaggctgagtacctccggcgccatgggaatgatcaggctgtcagtggcgacataggcgttgacggtcagaatattaagggcgggaggagtgtcgatgatgatgaaatcatatcggtcctggagctttgacagggcggttttcagcagaaattcccgccccggcttctgaaattccagttcggctgcggagagaagaatattggctggaagaagatcgcaggtatctgtaggggagacggcctgttcaggggaagcggtcccgcggaatacatcgtagatcgtgacgcagtgctcaatatcaagaccgaggctgaagctcagactcccctgcgggtccagatccacgcccaggaccttggccccgcggttatgcagggaggacagaagggcgcaggcagttgttgtctttccgacgccgcctttctgattggtgatcgagataatagttggtgacatacccctttacttctcctttcgtcagttccggaaaagcctgtgcgcagtctggcataagggcgccgcaagaaaatgcggtatcagctcttaatttttgacgattccggacgatataaaaagcgaggtagtaaggagtaaaaacgatgtgcaaattgattttactcaaaataaactggattgtcaatctattacagtgctgtcctggggggacagccgtgtcaaaggagtgaaggaaacatggcatcgatcggaagcttgactggcagcacctccagcggaagcatttatggaaacagaaattccaacatcatctccggactggccagcggactggacacggaatccatgatcgagggaatggtccagggctaccagcagaaaatttcgggactggagcagaaccgcacggtgctccagtggcagcagcaggcgtaccagagcatttccaacaaactggtggaattcgcacggaaatatgcctcttatacctccagcacaaacctgctcagttccagctttttcaacaatgcggtggtgaccaccccaaatgggacgttttccaatctggtgactgcctctggaaagaccagcagcaatgtggtgctcaatgcggtggcccagcttgccaccgccgcccgctatacggtcaacaactctctgggcgcgagtgcgaaggacggtcagatcaccgtagcgggtgaggagatcgatctggggaaggagatacaggtcagcaccatgagcggatcgctcacgctgacttatggaaatcagaacatcaccctggacttcggggagctggaggatttttccggaaaagacggaaagctggacttggataagtttaaggaagcggtagagaaaaagctggccgaccagaaaatcaccacttccagtggaaatgtggtctctgcctctgaggtgatcggagtagaagtgggacctcatgggatcgggttcagcgacaaatccggtgccgggaacagcatctatatcagcggagcttccggggacttcaaggacatggtgatggagctggaggataccatcagcggcaaatcaagcagcatccggctggatactgacaaagccgtgaccgaacgcgtatccacaacagagtatctccgggacaagccccttaccatcacccttaacgggcagaccaagcagatcaaagtgggcgaggtgacaccgcagaatggtgaaacctatatcaaggcatttgcacgcactctgaatgagtccattgcggacgcctttggcgccggaaagatcaccgtgggaacgacagatgcgaacaacgccctcacgttccaggtggccaatggaaacaccctgtccgtcaattcctcggtcaacgagctgctgggcctgggggagaatggcctgacctcatatctggataccagccggacgctgggtgatctgctgggagaggatatgaagggtctgactgccctgagaggcgagggactggacggtggaaacaagcccatcgaaaaggatgggaaatattatgacacagcgggaaatctggtggatcaggatggcaaccggatcgacagcgagggaaacaagctctattccatgaaaatcaacggggtggagattgggacctataccaaggacaccgcgctggaaactgtgatcaacggcatcaacagcaatacagaggcgggggtcaacgtcagctattccaaactcaccaaccagttcgtctttacagccaaagagacgggcgagggcggtaagatcgaatatgggactgtggatggacagggaaacgcaacggatctggcggccgccctgttcggcggtgcagtaaatgagaatgctcccgggtatgtgaaaggacaggacgccatattccaggccaccatcaacggtgagaccatgacattcacacgcagttccaacacctttgaggcggatggaatgaatatcaccttcagcggaacgtttaatgccgcagatggtgtgggaaaggaccccattaccagcgaggagctgaagaataaaaagccggaggacctcttcaaaacagacggtgagggcgttacctttaccagcaagacgaatgcggacaccattgtggatgcgatcaaatccatggtggaagattacaacgccattgtctccgaggtgaagaaggcgtactctgacatgccgctggaacagtccgacggctccaagtacaagcccctgaccgacaaggacaaagaggggatgacggagagtgagatcaaggcctatgaggaaaaggccaagaccgggatcctctttatggaccgggacctgtcctctctgtataacgcactgcacagcgctgttgcgccaggcggtgcagatggctccttcctgcgctccatcgggatcaagaccagctatgaggacggactgactaccatcagcctggatgagactgcgctgcgggaggctctggagaccaacccggaccaggtgcgggatgccttcaccaagagcaaggacaacggagcggccacagatggtctcatgacgatgattcagaaggtgacggaccgctatgctgccacgactggagatgtaaagggcatcctgatcgaaaaggcgggatcgcagtactctcccacagcggcactggacaatacacttttgaatcagatgaaagagatcgatgaacagatcgaaaaatggcaggataagatgtccaacaaagtggactattataccaacaagttcactcagttggaggtcctgatccagcagatgaactcccagagctccacactttccggtttaatgggaggctattgagccggataggagagaaaggattccaacacctatggatatgagaggataccaacgctaccgggaggactcgttaagcaccatgacccagggagagctcctgctcctgctctttgacgagctggtgaagcggctgacccaggcagagctcgaactggagcgggagcattatcctgcttttgaagcggcagtagacagaagtgtaaagatcatccggtacttggatgacacgctggaccgccagtatccgatcagccagaacctggaccgcctgtatgaatatttctgttatgagctcagccgggtcaaaaatggaaggaaccagaaggagctttcccgggtcaaaggaatggcggcggagctgagggacagcttccgacaggcggataaaagtcagacggaccgctgaaggagagacagaagatgctgagcaaacaggagcttgacgcagccttggcggcagaacgggcaatgtatcgggccctgtccgaggtgcaggatatcacccgggagctgctggatgcggtagaccgccaggatcaggtatcggtgcggctgtttttgagcatgcgtcaggagcagatcaaccagcttagagatcagaaggaactgctgaaaaagcaatgtggcggactgcccaaggaagagggcgatctgctgcgccagatcctgtccggaaaaaagccggcgggagtggagggagaggccctgtccctccaggtggaacggaaccgcgcgctgttagagcggacgcttcaggcggacaaggctctgagcaggcggctggcggggagagagtctttttaccaaagctgagtcaggccgctgtttggtggaaaaaagccctctgccggcatcttgccggcagagggagcttgatgtcattttagggtggagaagcgccagagcggcgcaccggaagagcggctttgggatagctccgcaaggatcacttccgggtcccacgcggccaggctgcgctcccggctgtttggatcagccaccaggattttcccatccagcgtgaccccgcgcaggagaataaagtgcccggagctggtaaagtggccgctccccatcagagctacaaagatgtgcccggaggagagatcctgacgcagttcgccaggggagaggtccgggacggactcagcactgagcccatatgcctgggagaccccctctacgatggagagataagagccgcttccgggcgcacagtagccgtgctcataggcccacgctgccatttcctccgggtcgatgtcctgatcggtcagagaggagaccagcatagacagggcggtgggaccgcacccatagccggagatcggatctggtccaaaaggccggctcgcccaaggctcctcaccctgattgtaataagtcagcgccactgtgccgccggtcaggatctccctatcggcccggacggcgaactctgtaatgttggcgtcctccatcggcggtgcctccgaaatggcaggatcaccggcaagctggctgacaggggcctcttccggtgtgagccggtccaaaagtccggcaccggcggtgcggacggtttgaaagagctgggaggcaggggctgtgatcctctgaaagagggctgggtcggcataggcgcagaccgccagctcggtcagaccgatgcacaacagggccagcaggccccagaggaccagcctgcgcctgaaatgagactttgatcgacgggacaaaaaaaccactcctctttatttgattatagcaaatccgggccctgatgtatagagaaaaaggggcgaaaaggagcgtagtatgccacagatccgcttggaacaggtgagtaaatattatcagcaggaaaagaaagcggttcccgcggtgagagagatagaccttaccattgaacagcaggaatttgtctttgttaccggcagcagcggcgcagggaaaagcactctgctgaacctgatcgcgggggagatcactcccactgccggagcggtttatctggacaatgtgcccatagggcagcagcgcagattcgggcatcccagaaaggcgggctgcatcggctatgtgccgcagatctcccagctgatgagaaagcggaccattgaagagaatctggccatggcatccatgatagggcgggggcggagaaaggtgccgatggaggagcgcattcggaaggcgctgtgtatggtcggactgaaggatgtggagaaacggtatccggtggaactgtcactgggagagtgccgccgggtggagctggcccgggccatcatcaacagcccatccgtgctggtgctggacgaacttaccgcaagtctggacgaggacactatatgggatctgtttcacttgatcggagagcttaaccgcctgggtacaacggtaatcatggccacgcacgccaaaaactttgtaaatctcatgcgaaagcgtgtgatcactctggtggacgggaggatctttggagatgtgagaaatggaaggtatggagatgtgatgtagaaagagcagagtatcgcagaactgatcgagataaatataaaatagataaaggaagtagttgccatgctgaaaaatatgaaggtcaaaaaaagtctgatcctgggatatgggatcactattgtgatttctgtagcgctcattattgcctccctcatgatgatgaacaatcaaaggggccagtatgagatgcttatgaatgaagatgtggagaccaatatggccatcctgaatgcgcgggtcaatgccattacggcgggccggaactaccgtgacgcgctgttggtccccgaaagcagtgccaacgaaagcctgatcgcgcaggcggaagccgccctggaggcgatgcagacctatactgcaagcctgtatgagacatggcccagccagatcgaggaccagtcgctgctggaaaaatacgacagcattaacagcgagtggagagcggttgcggaaaagatcatgggcctttacgagcagtatcacagcaccgggaacgagctctatctggagcaggcaaaagagatcatttacaatgaggataccccgcttcagacagagatggggaatgcggccactgaactggatacttttttggaaaagagcatggccgaggagcggaccagaatcgagaacagcgtgaagggaactttctttgcgattattgccgctatggtggctgctaccatcggtgttctggtcctggcgtttgcgctgatccggaatgtgaccggccccacagaggaggtccgcaacgccctggtgggctttagcgagggcaacatggatatcccggtcacattcaaaagcaagaacgaattgggcgatatgtgtgaggccctgcgtaccagccagcatgttttaaaagaagtcattgcggatgagtgctatctgttggaagagatggccaacgggaattttgacgtacattccaaaaacgtggacatgtatgttggcgtactccagtccgttctcaagtctgtcagggtcatcaatggaaacctgagcgataccctgtctcagatcggtgtcagtgcggagcaggtgtctgccggttccgaacaggtgtccaatggggcccaggcgctggcgcagggcgctaccgagcaggccagcgcagtccaggagctctccgctaccatttctgatctggaccagaaagcacaggagaatgcggagactgccagagttgccaaggaaaaggcggaccagtccggcgaaaagacccaggcctgcaatcagaagatgcaggagatgcgccaggccatgagcgacgtgctgaagagccagacagacattggaaagatcattgagaccattgaaaacattgccttccagaccaatattctggcgctgaatgcggcggtggaagccgcacgggccggctctgccggaaagggctttgccgtagtggcggatgaggtgcggaatctggcttccaagtcggaccaggcggccaagcagacaaagaagcagatcgaaaatgccattgctcatgtggagcggagcaacgctctggtggaagatgtggtaaagagcatggaggagactgtggaatattccggtactgccattgactatctggatcagctggcggagaattccattgcccagtccgagtcgatcgctcagctgaccacgggcgtggatcagatctctgctgtggtccagaccaactccgccaccagcgaggagtctgcagccgcgagtgaggagctctcctcccaggcggtcgtcatgaagcagatgatccagcgcttccggctgaaggaaggaagtgccagaactgaggagcccgctgtcggccagtgtgagcccgccattccggtcggtgggctggagctgtcccagggagagaaccggttcagcaaatactgagtgccgggagctgtgcgaaaagaaaaaaggggcacagccaggacctgaaaaagaatattcggcagatagataaacaggcggggtggggaggttgtcttaaaagaaattttaagatagccttcccgctttcgtaagggggtaattccatggaagagaccagcagacactcggaccaggaacaggatctgatctatgcactggacattgggaccagaagcgtgatcgggctgttggcccggcaggagcaggataaaatgcgggtcctcgaagtggagaggcggccgcatgagagacgtaccatgctggatggacagatcgaagatatccggcaggtggcaaaggtagtctccgaggtgacgaagagcctggaggagcggagcgggagaaagctggagcgggcttgtgtggctgcggccggccgagccctgagaacggagcggggagagtactgtctggagctctccgctccggagatcgtgaagggagagcggatcagccaactggagctggaggcggtggcagcggcggaacgcacccttcaggataaggagcaggagcagaggatgtttctggtggggtacactgttacacagcttcggcttgaccattaccccatgaccagcttggaaggacacacagggcaggtgctggaggcggccgtggtggctacctttctgcccagcgaagtggtggacagcctgtacgcagtgatggtggaggcgggacttgaggtggcgagcctgaccctggagccgattgcggccctgaacgcagccatcccggaggacatccgcctgctgaatctggcgctggtggatattggagccgggaccacggatatcgctctgtgccgggatggaggcgttgtgggctacacaatggctacggtggccggagatgagatcacagaggcgctgatgcgggcgtgccttgtggactaccacactgcggagcggatcaagatgcagctggggaagggggcacccatttcctttgaagacgtggtaggcgtggagcagagctgttcggacgaggaaattttttctatgatagagccggaggtccagcggctggccgatgagatcgcccgccgggtcctggaattgaatgagagaccgccttccgcgctgtttctggctggcgggggcagcaaactggcaggactgagcggacgggtagcagatgcgctgcagatggaccgaaaacgggtagctgtggccggacggtacttccagaacagcgcctgctccgatatccaggacctggacgatccggaatataccacacctttgggcatcgcggtctcagcaggattgggactgatcagcgacagctatcgggtcgtgctcaacgggaagccggcaaagttgttccggagcgggagggtgacagtgctggagcttctgatgatgaatggctttacccacagcgacctgctgggccggagcggaaagagcctgatgctctacctggatgggaaacggactgtattttatggagaacctgccctcccggcgaggcttgcgatcaatggagtggaggcaaagccctcccagatagtccatgcgggagatgtgatccagttcgagccggccaaggcgggaaaggatcaggaactgaacgcgggtcagctgagccgacagctgggagtgggaggactggcgtgccagggaaaactgctggcgccggacactcctctcagcacgggcgacagcctggaaaccgtgcaggtatctgaaaaggggccggagaaggagaagacagctggggcgccaatacagaccggggtgccaatacagatcgaacttaatggcagaccgctcccccttccagggaaggcggatggtacgccctactatttgatggacctgctggagcggtccggaatcgacttcaaacatgcagagcggccggtgcggcttacagtgaacggtgcggactgcacctttcagcagcggctgaatgatggggatagagtggagatccaatatgagtgatcggatggaacaaggaagctggaggaatctggcgggaggcgtactgacgctgtgcctgaccctgacgggatgcggcggaggagccgagccgcccgacaattatgggatcggatcagatgcactgcccgcgttgaccaagctggtggccctgggcagcgaaatgacctgttcggtgcaggagaatacacaggccggcggggaccaggacacagatgaggcccagggacagccgacctatgaatactctgggctcgagtccggaaaccaggttgcggcagaatatgtgcagatgttggaggacaattatgactgctccattctgggcagcagagacgccccaaaggaggagcctgactttcaggcggagaggggggaggtgacggtaggaacaaagtgtgcagaaggggacggaatctttgccctggagatcagatggcagacacagtcctgttctatcacgcctgttctgctggaaggggcggaagaggaggcagagtcccttacagttgaggaggcggtgcactttctggaagagatgcctccggagaggctgggactgagcggcagtgatatgagttcctatctgttgttcccggaggaggggatcgtgatggtggacgggatgccctgctactgcatcaatgcttacggaagagaggatcaccagatcctggatacctacctggtatcagaggatgggagcggattgtaccggcttgaccgcggggaggatgcagtctcagcgctgacataagggggcggaaggactgcctgaaagcgggatagaagttcaggagaaaagtgatgcgttgggctgatgccctttttccgcagtgggtccgcagaacatcagtaaaatttgatcgcgaagaatttcgatgcatggacagcgtgatagaaaagatgctggtcagttttggcactgacgcaggggacggcgggcactgttcaaggcggtcgatgttcagactgcctgggaaattatttttcggcagaagaaagtgcaggctgtcggacaggcatttataaaagaggaaaaaactgggtgggacgatatggatcatcagatacaatatccggggaatatggcggaaggcactttgatgccgcaaaatgatgcagtcaaactgacaccagagctcattgacagcttcgaggcatacatgaaaaataagggaatggatcagggctccattaaaagctacagacaggctgtggagatgctgtatcagtggctgccggaagagaaagtgatggaccgggatacactgaggcaatggagcgagaaccttcaaaaggaatcgtatgcggtccgcacggtaaaccgattcctctctgtgggaaataccctggcggatttcctggggcacagggaatttcagatcaagaccctgatggtggatgcggacgaggtgctgccggagctgacgcgcaacgaatatttgcgtatgctgcagacggcaaaggcgttgaagaacgagcgggtctattttttgataaaggtatttgctaatgttgatcttccggtgcagcaggcatccaagctgacagtggaggccgcagaagagggaaaactggtgataaacagaggcggcgggagagagatcatccgtctcccaaagtgcctgtgtcaggagctcttgtcctatgcaaagcggagcgggatcacaacaggccccctgttcctgaccagacagaaaaaaccgatgcggaggacacagatctccgacagtatccgaagaatgtgtctggaggctaaaataccagaaggaaaaggaaatcccaggtgtctgcggaagctgtataaagagaccatgcggtctatttatgccaatatggatttcctatttgcgaaagcctacgagcagattctagatcaagaacaattgatatacggatgggaagagagtgtttgaatcggggagcaagtgtacggacaggacaaaaggcaccttgggcaggatgatacgaaggtttaaacggagtggcgcggtgtgagcgagccactcctgttttccatattaggaacaggctttccctgcataagcatcaaatgagggaccgcccagcctttccaggggctggacggcccctcatttgacgcttaggatctgcaatcttcattttgacagatatttgataccctctgcaccctgagggaatagtgctgttggatataaaaagtaatatggacaggctgcctctgaatagctataagacacaagcgaacagaaaggttgtgccgagattgagtgaatatgaattggatgcgctccaacaaattgaccttgctgctttggaggctgtggatgtccaaacagtatcccctgatgatctggtcgatttgaaggatatccaaatcgacccttcccttccgaaggaggagcggatcgcatcttttatccgacaggttaaaaatccctattgctacaaatgcggaaagatcgtggtgaaggtggggtttgaggaaggaacgaccctggaggaacagctgaagacgatcttctctactatgatctagccagctccgccttgaggtacagctttttggatctgtctgttgccgaaacctgaaatttaagctggacaccgcgaggcggtgttataatgtgtctggagcggatcagaaaatacagcactcataaaggtttctgcgaattggatggtccattgggaggaaacctttatgagtgctttttttgcatcatcaactgcatcacatggacagatctgggatgtagatatctatgtgcgcgcatcccgcgaggacggcgacaaggaacagagcgaaaccattagcaaccagatcactatgctgaccgattttgtccatgggaggccggagctccggctgcacgagatccgcaaagatgacggtatttccggtgtgacctttgaccgtccgggctttcatgcagtcatggacgatgtgcgatccggcgcagcaaattgtgtggtagtcaaggacctctcccggttcggacgggactatatcgaaactggtaaatacctggaagaaattttcccctttatgggggtccgcttcattgctgtcaatgacaattacgacagcatggcggaacactccgccgcagacgatgtggtgctgcccttcaaaaatctggtgaacgacacctatgccaaggatatctccatcaaggtccgcagcagcaaggctgtaaagcgcagaaatggcgattttgtcggtccctttgccgcctatggctactgtaaggacccggagaataaaaaccagctcatcattgacgaaggagccgccgaaactgttcgacagattttcagctggaagctggatggtatgagcgcccaggctatcgcggaccagctcaacagcaagggcgtactgtctcccatggagtataagaaatccattgggttgaacttcaaaaccagcttcaagctcaacaaaatggctaaatggaccgctgtggcggtgctccgcatcctgaaaaacgaactctatattgggacaatggttcaaggcagagaaacgacgcccaattacaaggtcaagacccgtatttaccagcctccggaaaagtggagccgtattgcaaacgcccatgagccgatcatatctccaatgatctttgcccgcgtccaatactgcctttccctggatacccgttccgccccccacagtaagcaggtctatctattttccgggcttctggtctgcgcggactgtggtcagccgatgatccggcatccggttcagagaaagggaaaagagtacatctactatgtctgttcctcggccaaatgtggaaaaaagtgtgagaaccacaatatccgggaggagtatctgaaggaaagtgtgctggtctccattcaggcgcgtatccgcagtgtgatcgacctggaaaacttggttcgctatgtggatgcacttcccttacagcagcgggagatcatcaggctccaggcccagctcgcccaaaagcaggaggaagcagagcggtacaagaggctttttcgctccctttatgaacggctttcagaaggcattttgacccagaatgaatttttagagttcaaagcagtctatgcccatcgttgcgacgaggcagagcgggcggctggcgcgcttcaaagggaaatcaaggcggcaacagcgggaaccagtggaacctttcggtggatcgaagacttcagggaacatcgaaacctgacgaaactcaccagaaaagtggttgtcatgctgataaagcagatcaaggtctacaaagatcagcgcatccacatccaattctaccaagaaaacgaatgccgctgcctggctgagcggatcatgtcagccgccgacggccagcctgcggctgattacaggaagggggataaggatggcgaggaccagccgtaaacagatacatcagcagacagaccttgctcaggcccctaaaacctatctgggcggcgcttatcgccgcctttctgtggaagatgaccgccaccgggaccgccactctctggaaaaccaggaaaacattattctggactttttaaaaacacatcctgatatccgtcttgtggaggtctacaccgataacggagagaccggaaccaagtttgaccggccggattttcaaaggatgatggaggatgtgcgttccgggaagatcaactgcatcatcgtcaaggacctctcccgctttgccagggacttccgggaggctgggcactatctggaacagatctttccctttttgggagtccgctttatctctatcaacgatcactatgattccagtgatccgaagcctgataaggaaggaatcgccattcccgcaacgaacttgatcaatgagctgtatgcccgtgatatttcccaaaaggtcaacagcggcctgaaaacgctgcgaagtgcggggaaatttgtgggtgccctggcgccttatgggtataacaaatccccccaggataagcaccagcttgtggtggaccctcctgcagcagaggtcattcggaatattttccaatggctcctggatggctggagcgactgccagatcgtgtatcatctgaaccagcaggggatcccatcgccaggacaataccgctatgagcagggccttctaaagcatgagcgatatgagaactgcggtccttggaaccggaccgcgatcaaaagactggtccggaaccgtgtctatgctggagatatggtacaagggaaacggagcagctcctatttcagccgccctgggccaaggccggaaagcgattgggatatcgtagaggacacccatgaagcgatcgtgagcagggagacctttgatgcggtccaaaatcttctgaaggaccggacggacttgtttaaaaagcgggccgagaaaaataagggactgactttccatcaaaatcttctgcgtggcgtggtgtactgcggtggctgcggccgtcctatggagcgcctttattatcgctccggcagacacaagaaaggagaacgccgtgtctattactatacctgccagacctttaccaagcgatccaaaagtctgtgtgccagaaatatggtttcggagaaagagctgcgggaggcggccctttctacgatccaggctcagatccgcattgccgccgacttgaaaaggatagcaacggaggtgtgggatacgggggaaaccaaagaccaaatcgcggatatggatgccgagatccggacccttcgacaaaagctcgcccgcagcagcaccctaaaacgcggcatctatgagaactacatagaaggcgtcttaagcaagagccagtatctctctgccaaggaagaatacacaaagacggaggcggcattccagcagcagatcgacgccctcctgagtcagaaacgctgcatggccgaacacctgactctcaataacagatggctgaaagacttcctgaacgatgagaggggtatggagctttctcaaaaaatgctggccggtcttgtgcagcggatcgatatatttgaggaaaaacgggtgaggatcacgctgaaatttcaggatggataccatctgcttactgatcatttgacggagagagctcatagcagagagaaggtggcgggatgaatgaactgtttgctcccccggaaagcggccttttgatctcctatcttcgagtgtctttggaggatgaaaacacaggggaatcggagagcatttccaatcagcgggatttgatcggctgctatctgaagcagcatccggaatttacagcctacaaggtcatggaagtggtggatgatggacacagtgggaccaactttgaccgtccaggcatcaaacgcgtgttggagctggtacggcagcggaaagtcgcggccattcttgtcaaagatctctcccgttttggccggaattacaaagaggtcgggagctatctggaacaggtgtttccctttcttggggtccgttttatatctgtcaacgacggctatgacagcaacgaatacattggctcaaccgggggcctggacatcgcctgcaaagctctggttcacgatctttacagccgggatatttcccgaaaggtaaagagcagccgatatgcccgcctgcggcgtggcgattacttttgcagcgttgctccctacggctatgtgaaaagcagtgaagataagcatagactggtgatcgacccgccagcggccaaagtggtccggcgtattttcgatatgaccctggcgggcttttgcaccacggaaattgccagaacgcttaatctggaagatgtgccctctcccctgatctacatgaggcagaagtatccgggcaaaaagatagcggccctggaggatggtttttggaacaattttgtggtgctgtccattctctatgaggaacgatacaccggcaaggccatcagcggtatgcgccccaatcttcgggtcggcagcaagcagcgccggaaaacaaaaagggaggactggatcatcgttcccgactgttttgaggccattgtctccgaaaacgagtttcaggaggcgcggcggtgtatcgaccatttggaaaagagaaaaatgacagcaccgccgcacttgttctataaaaagctgcactgtgcgggatgcggcagggccatgcgccgcagcaacaccacggtccgatacttttattgcaataccaggaaattccgcgattctcccaactgcatggaaggcagactgatggagcaggacctgatagacgcggtcctgcttgcgatccggcagcaggccaggatcgttgtggatacgggccagctgattcagcaggcaaagaaaaatcgcggtacacgtgtatccatactggaacagcagatcagagcgttagaaaagcggatcaaagcatcaaatcggtcccgaatagagctgtttgagcagctgaacgatggggtgatctcgactgaacagtataagacaagacgtgaccacctaagcagacagatccaagagctggaggcacagaacagacagcttactgaacagatgagggagctgctgggaaatgccacagagaatggctttgtttggctgttccgcccctgcgagcaggtcgagtctttgacccaggagatcgtagatgccctgatccgctccattcggatctacagggcggaccaaattgaaatacaatggaaatatttggatgattataaaaaatgcttggatctcttgaaagatcaaacggacaggaaggcggtgtgatcctatcagataagccccttgttgaagtatcttaaaacacgatcgcgacaatttgaaatcataaatggcagacttgtgataatatttatcataagcctgccatttatttgtcgtattggaggaagtggctttttgcttacttgacaggtgagggcccgggaataccctgagggccggtagggccagtggcaccgttaggtccagggataccctgcgggccggtggggccagtggggccggtcccgacgggcgggatgggcccggggcagataggcgggcagggagcagggccaggcccagggcagataggcgggcagggagcaggcccaggcccggggcagatgggcgggcagggactggggccgggcccgggacagacgggctggcaggaaggcgggcaggagcacgagcagcggctgcccgtaccctgggagcacatggagtcccagcgtgtcagacttctgtctgaaggaagataacggttcatttgggtctccttttcttcattcaagattgcgtggctttgccacagcccattctatgcgactgccgttcttccggtgcgcctccgcgcccggacgtcctttcccgcagccgcccctttacaatccagaacatttctgacataatggaggcaaaccaccaccattcaccaggaaaggccgtgttgttatgtctgaccgcccctatgttctcgccctggatcaaggcaccaccagcagccgatgcatcctgttcgaccggcagcagaatattgtcggcctggcccagcgggaatttggacagcactacccaaagcccggctgggtggagcatgatcccatggagatctattccagccaatacagtgtcctcaccgaggtgctggcccagagcggggtggaccccgcccaggtggcggctatcgggatcaccaaccagcgggagaccaccatcgtttgggaccgggagacaggcaggccggtgtacaacgccatcgtctggcagtgccgccgcaccgcggccctgtgcgaggagctgaaggcggatgacgagctcacctcctacatccgggaacacaccggcctgctgccggatgcctatttttccgccaccaaactgaagtgggtcctggaccacgtggagggggcaagggagcgggcccgtcggggggagctgctctttggaacggtggactcctggctcatctggaagctcaccggcggccgggtccacgtcaccgactataccaacgccagccgtaccatgctcttcgacatccagcgcctgtgctgggatgagcacatctgccggacgctggacatccctatggagatgctgcctcaggtgagggactccagcgcggtgtatggcactgtgaacctccagggagtggaggtccctatcgccggcatcgccggtgaccagcaggcggccctgttcgggcaggcctgcttctctccaggggaggccaaaaacacctatgggactggctgcttcctcctgatgaacactgggcgggagctgtgccggagcaggaacggtttgctcaccaccatcgctgtgggcctcaacggttcggtgcagtatgcactggagggctctgtcttcgtgggcggagcggtgatccagtgggtacgggacgagctgcggtttttcagcgagtcccgggatgcggagtactacgcccagaaggtgccggataccggcggggtctatctggtcccggccttcaccggcctgggggccccctattgggatatgtatgccaggggctgcctggtggggctcacccggggcacgacccgggaacacattatccgagcggcccaggagtccatcgcctaccagagctgggatctggtccgggccatggagcaggacaccggcctgcccctggccgaactccgggtggacggcggggccagccgggaccggtttttgatgcagttccaggcggatatcctggacaagccggtccgccgccccatgatccgggagaccaccgctctgggggctgcctatctggcgggccttgcggtgggggtgtgggacagtctggatgagattcgcgcccagtggaccctggacagactgtatcagccccagatggaggagcccgtccgccggtctctgctggctggatggcacaaagccgtgggccgcagcctgaattgggcagagccggagacatgataaaaagtggcgtccatccgcacactgcggatggacgcctcagcttgtcaaaaagccctcctgcaaggagttccggcgcccgcaggcaccggaatcaaattggagcacgtcatttccgggggcgtgtacctcggaaatgacacctcttacgcaagataggacgacttttccgagaggaatcaaggcctatcttgcgtgcttactttctcgaaaaagcggctctgccgctttttcgacagtctgtggcgtccatccgcacactgcggatggacgcctttcgactcttatgccatgcctgtgaaccggtccaggagctgctcct

SEQ ID NO: 13567 - DNA, 9354 bp, Unknown
  gut microbiota DNA sequence
agggagcacccgcctccggtccagccacagctcacagatcccagagtcgccgcagtccacaaagtagcggaccagccgctccccttcctgacacaccactccggagcggctgtatgctccggtcccgtagcggtaggaggaccacagaatgtcgtgctccagcgcccgatccccgccgccccctagaagccgcagcccgccagtgactgcgccgtccttggtgagcgagacagggccgccgtcctccggctggaccaaggcatagcccgggggcagctccatgcggcagtagggagtctctccggcacggctctgtcccatgcccagcagggctgcccccagcagcagacccgcgcacagcagcaccgcgcggggaagttccgattttcgcctcgtcatcaacgccccccgtttgtttttttcagcctatcacactccgcctggcgccgccaccgcagggaggaaaaaagtatgtaaaacctgtgtggaggtcttggccccgggcttatgatgccctgaaacggcggcgctattcgtcgtgtttcgtcgtgcgccgacaaaacaacaggatgaaaaaatatttgggaggccccttcggtcctcccaaacgattcagagctcggccagctgggcctgatagaggtcctcggtcctggcgtcaaaacagacaaaggtgacctggggcccttccggatgctcctccaggaagcggcggacagtgtccaccgcgatccgggcggcctgatccggcggatagcggtacaccccggtgctgatggcagggaaggccgcggtgcggcagcccagctccagggccagagccatggagtttcgatagcagtccgccagcagttctgcctccccatgcccgcctccgtgccacacggggcccactgtgtggatgacgtatcgggcgggcaggcggtagcctccagtggccttggcctggccggtgggacagccgtgcagagtgcggcactcggccagcagctccggcccggccgcccggtgaatggccccgtccaccccgccgcctcccagcagggaggtattggcggcattgacgatggcgtccacctgcaatttggtgatgtcccctgtgacagcgcgcagttccatggaaagccctcctgttttctgaattttgggatgcttctagtgtaccacgcccagccccggagcacaaggaagaggcgcgtattatgtaagtctcagcggcaccatcagggcgcgggcattgactcccgacggcgcacaccgcatgccactcagagcaggtcacgttctgaacgtcacaaaagtgatcaaagctggagatgcccggagcggctgtgtcaccacttcacagcacaggggcccgcaggatgccccggtgcaagtaccgcagaaaccagcatcttcaggccgcagaggagggactcagaagcccggcagcatcggcaggcattcagaagggcactcccatggagagcagggggctccggcagatcatccatctgactccttctggggctgaggatggccgccgcgccgggccaggaaaagtccggcgcacagggcggtgaagggggccacggtgaccagaccgaaggagccgatgacggtgtggatgatctccgccgccacatacttgtagttcaggatgtggtcaaccggggtgccctgggccatgaagaccatgagcagggcaatgtagccgccggagtaggcgaagagcagggtggtggtcatggtgcccatggcggcccggcccacgttgaggccggagcgggcggcctcctgccagctcagatcgggccgcttcttcaccacctcgtggacggcggaggtgatgtccacgctcaggtccatcaccgcgccggaggccccgatgaagatggaggccatgaagatctgggtcaggctcaggtgggcgtagccggagtagagcaggctctcagagtaggacatcactgccccgtggatctggaacaggtcggtaaagaggatgcccagcacacaggtgaccaggatgccaagaaaggagccggacaccgccgcccagcaccgccggtcaaagccgtacaccagagcgatgatcaaaatggtgagaaagagggtgatggccagcccgacccagatggggttccagcccttgaggtagagggggaccaggagcttccacaggcagagcacagtcagcacgaaggaggcgatggcccgtaccccggtgcgcccagcgaacagaatgaggaagagggcaaagccggcggccatcagggcctcccagcccaggcggtagtggtcgctcatggtgacattggtgatggtgtccccgttgtggctcaccaccacctgggccctgtccccgggagagaagagcttgtcctgctccagagagccgttgagcatgttgatcccggtgaccgtccttccctgaaatctgccgtccaggatctcaagctggcagcgctgctcaccagagcggaccaggccggtgtcgatgatggcggagttgtctgtctccagcacccgggcggtgcagcgctccgcctcctggtagatcagagcgccctcaaagccggtgggcaggaccagaaggagcaggatggccagcaggcataccagcacaggggcttggtaggaaaaagaatgggatctgaggcggtcgagcatggatgaaaactccttttcgcatgatttcgggggacaggaaaatgtctcactccagaacacaggggcggcccgcccccggcaaatatgccggaggcgggcccggaaggggcgctggaggggttgcctggaccagctcaggcgatgttcaacaggtcggccagcttgttgtagatgtcggtgttgtcatagtagccgttgaacatctcgctgcctgcgccctcggccaggactgccacgggcaggccggtgtggctgtaagaggtgaaggagatgccggacttgttgttgatgatgtgggtgatggtgacagagaggggctcgtaggtgccgtagagcacatactccgcttggtcgtactggctggaggcggtgccgttgatgctcttctcataggcggcccgcagctgctccatctcataggcggtgaggaccagcttgtcgccctcctcgccctgggccttcaggccaaagagcttctcaatgtcggccagcacggtctcaaagggggtcttgttggccttataggaggccacatagtcgctgtcgtacttggcgaaggagatcttttggttctccagcagatccagataagtgtcgtagtcggttccggcgaagccgatggtcaggccgccggtctcatggtcgccggtgactaggatgagggtctcgtcagcatgctccttggcgaagtcgatggccacctgtaccgcatcggccagggcctgggtatcgtggatggaggcggcggcgtcgttggcgtggcaggcccagtcgatcttgccgccctcgcacatcataaagaagccggtgtcgttgtccagcacttcgatgcccttggctacatagtcagccagagcccacatgtcgtcggtgcggtccagctcataggccatggcgtcggagtcggccaggtcctcgtcgatgatgatggctttctctgtattggtgccgatggcgtcggcctcggcgtgggtcttggccacggtgtagccggcctcctgggccaactcatacaggtcggtctggtctccgctgctgccggtgggcttgagcagtccgccgccggcaaagtagtcgaagccagactcgaccagctccaggccgatctcatagtagctgctgcggctggcctgatgggcatagaaggcggcaggggtggcgtggttcaggttgacggaggtgatgacgccgatctcccagcccttctgggctttcagctgctcggcaatggtctcatactcgatggtgccggtctcatccacattgatagagccagagtaggtcttgtggccggtggagatggaggtggcggtggaagcggagtcgggggcgaaggagttggagtcataggtgacggcggagccggcagcctcaaagttcataaagttgaggtactcggggccgtcgaggatggcgccctggttgtcatccagactgggctgggcctgccagtagtcagcgtccttcagggcacccaggtagtcggaggtggactggatctgggggtagctcatgccgtccccgatgaacaggaagacgtatttaggggacttgacggacgcggccgcagtggcagtcagagcggcggtatgcggttcctgagactcctgcgggacctgggcggcgttggcggcgcagccggccagcgtggcggcggccagggcacaggacagaagtgcggttgcgatttttttcatgtttgtttgttcctcccaatttctcttggacagtttgtgaccgctgggtcaaggctattctagcggctctgcgttaagtccaaaacagctgaagtgtgaaatctgcgttaaagaatattatcggctcagcagcccatgcccgcacagagagagcgagcggagcggcaaggaacggaatagaggaacacggcgttttgattcagattcagacaatgaagggacacaggagaatgtcatataggcatgactataatgtacaaattttgaaattgaattttgtacaggactgccaattttgtgctgagtaaagaggggagatccatcagaaggctggcacaggtggaggggggagagaaaatatttttcaatccagcggaaagtgaaaagcgattcggatatttgttacaaaattgttaacgaaaaattggataactctaccagaaatccttttaaaacaatgaaaaaataaacacaaataatgaatgaattagatattatgaaattgtaaaacgggtagatgcaaaaaatagatttaacttcaggcagaatgaatgataaaatagagcctcagaggacacgaagttgtctgaaactgacaagaacacatgggacaggctttcacaaaaatgaatctcatgcataaagggagcgctgtccggctagggtgttttttgtgaaacagctcaaaaatggccatgtcggacggtttaggcattaaaagcgcatcagccgctctgacaatgggctgagcgggatgaaagggaggaagttgaacgatgcatatcggaacaggagagctgatcgtcgtgctcgtggtggcgctgatcatcttcggcccgtcgaagctgcccgcgctgggcaagatggcgggcaaggcggtgggaacactgcgtcactatgcagacagcaacaactgggacgaactgctggaggaagaggaagaggagaaaaagtccggaaagaagcaggaggagaagtctcagaagcagacggagaacgagcaggaggcggagcctgtagaggagcccgccgaagaagcagagcaggcggagcctgccgaagaagtggagcagccggagcaggccaaggagggctgagcagttccggcggcagaaattgtcaagaataaaggagagcggattgtaatgtttggaaaatttggtactgtggagatactgctgatcctggcggtggctctgctgatcttcgggcccaccaagctgccgaagctgggcaaggccattgggcagaccattggaaactttaagcggagcagcgccgccgcggagaaggctgaagagaagcacgacagcaaagagtcctgagcccatccatgagccgcgccacattagagcaggacaagaagaaaaccagagcgaaggacggtccgggcgctgaaacggatcggaaggaacgggaggaatacggagaggagacggacgagctggaggatgacgtgccccaggggggcaggatgtccctgctggcccacctgaatgagctgcgccgccggctgaccatctgcgcggtctgctttctggtgggggtggcactctgcctgagccaggcggagtggttcaccaacctgttgctctcccggggagagaacttctcctttgtgtacattgcaccggctgagctgatgatgacctacgtgcggatctccctggtggggggcgtggtgatcatcatccctgtcatcatctatcacatctggcgcttcctccagccggggctgaagcgggcggaacagatgggcttcaacctgatcatcacggtggggttgctgctgttctgcctgggtgccctgttcgccttcaccatcgtgctgcccatcctgctgggcttttttgcacggctgaatacctccgggactgtgactgccatggtgtcagtgcaggagtatgtcagctatgtcatttccaccatgctgatcttcggcgtgatcttcgagacccccattgtgctggtggccctcaccggcgtggggctggtcaagcccaagacgctgcagaagaactttaaatatgtagtgctgatcatcctgatcgtggccgccgtcatcacgccgcctgacgtgacatcccaggtcctggtggccatcccgctgatgattctgttctacgccagcatcatcctgtgcaagatcctgttccgccgcaagctggcagagcaggaggaagatctagattgagcgtgtgcaaccaccgggacggcggagacagagcgtgaagcattgaggggacgcgccccgcccggagtgatattgcaaattgagaaatgaggaggaatacaaagtgagtggtaaaaaggagaacgtgcagagcagcggcattacccgccgagactttgtaaagggtctggccatcggggctgcgggcctggggatcgccaccattctgcccggcgggatcatcaccgcggcttccgcggcggacaccaccaccaagcagcaggtcggcaagcagggcgacggcatctatatcgatggcgtggctgagaacatgaagagcaagacctatactctggagtttgtccagcccatcaagctggtggcggtgaaggacggcaaggtgcagagcgagggcacctggcgtaccaccaataagcacctggtctctgtggacccggacggaaccaccatcatgcgggacggcgtgggcggctacgatgtggagatctcctggacattggggagcaccacctatgccgtgaccctgcacaccggccagaccgccggagcccacgccatcgaggtggatcaccccatgacccggggcgactttatgatccgcctggccaaatatttcggctggccccactacaacgccgtgatggacgacggcacggacatcaatgacaagggcgaggtcatgaccacggagcgggtgcgcaacttctatgatgtcactggcgacaatgactatgtgaaagccatcgagtccgccctggatatgggcgtgctcaccgccacctcccccgaggactgcttctatcccatgtccgagatgacccgggaggacgcggctgtgatcctggtcagcgctttcaagatgtccaagctgggtgccgattacatctccaagttcgatgacaccaacaagatcgacaagaactgctatgacgctctgaatatcctggtgggccgcaactttatgcggggccgcagcaacaccaccctgaatcccaccgatggcatcaccgacaccgaggcacgcatcatcatcgaatccattgacaggcgcgtggtctgccccgtgtgggccatgccggtgagcaaccggaagttcgtccgtgtccgtcccgagtggttcacctccacccaggatgccgtggtccattggcgctgtaaggtggacaagtactcccaccccgagctgaacggcctgtttgtccaggaccgcggcgtgggcgtgtacgtgggcaccggctggagcgactggtatgactatatccccggctactccactgacccctgctttggcctgaacaacaacaaagacctgccttacgacgcgacttggcttatcgtggacgtggagtgctatgccaccaagcccggcatggaggacagccctgtcaccaagttcatgtggcggatcgagcgtcccgcgtggcacgactttgcctttgacaagctgcatgacgccggggaaaacttccccgcggtctaccgctacttcgacaacttccaggcagcggcctactatatcgagggcagcaagatgggcattctgtatgacggcctgatgcctaccaatacaaatatctcactgatcgaccgggtgaaggaagtggcgaccaagccctttgtcttcgtgctgggccacaaccacggcgatcactccggtgccatgccttatgcttatgagcaggggatggacatttacatgtgtgaccgcgtcggccctgccggcggggattggagcatccaggagtacaacaagaagtacaccagcgccaatgcggtggtcgatacagagaggaccggaagctacaccggagacaaggtgcacctgattgatgagggctatgtcttcgatctgggcaactgtaagttcgaggtagttcatcttcccggccatgaggacgcatccatcctgatctatgaccgggccaacggtctgctcttctcctccgacatctacgccgtcaaccgctactgggtggcagacaataccggtgctaccggtgtgaagcaggatctgctcctgtcactgcaccagcagctgatggacatctataccaaggacggcgctcaggtcaaggagctgtacaccggccacaaccgcatcggaatgggcggcgactacctgaccatgtgggagcagtgcctccagaagtttgtggactttggcggcgcagctttgactgataaccgccgcggcgacggcactctgatggctcaggacggcaacgagtatgagacgctgaactggactggcctgactcagagcggcaagcacatccatgctcagtataagggcgtttatgacggtaagacctactatcgtcttgagatcgatcgcaccggtgagaacgcacagccggaagatgggctgtattttgactacaagactaacgcccatctcagcaacatttatttcaaggatgccaccctggtgggccacgacttcaagtacaagaccggcttcgacactgtggacgacaagctggaggacggccgtctgaagtacgccatccccaacaagttcgtgccctatgagtatgactacgaggtaaaggtgggggcccttcagagcaccgttacctttacgcccgtggccatgtccaaccggatcaaggacctgaaggtcaacgggaagtcggtctccagccgctgcccggtgagcgtgcccgcctccggcaagaccaccatcgaggtcaccggacccgacgggagcaccaaggcgacgtacaccctgacctttgttgttggctgaaccaacagaaaaaagtgtgcataaaaagtcccggcctggcgcaaatgcgtcaggccggg

SEQ ID NO: 13568 - DNA, 1051 bp, Unknown
  gut microbiota DNA sequence
atttggatcagtggagagctccaggccctgctcccgcagtttgtcgggcagctgggacaggaggaaggacggctctgccttgggttcctccagcacatcaaagctgtctatgtatctcatgtgggggatctcgcccagcacttggtcggtgaaggtggtgagcatccaccaggcccggccttcctcatcccggagcataggcagcagcttttcacagtaggcggagatggcgaagctgttttcaccctgctcctccagccagatctgcacatcctccccggagatgtcccagccatcctcagtacgcaggccgatgttctggaagggctgacggcccaccaggatgttccagtgcttcagcatctctttcggagcgtgcttctggaagtagaccagctcaaacagcttgaccttgtcaccctccggagtgaggatcagctcgtacttctcgccgttgaagcccatttcaaaggagatttcatcaaagaccagattcagggtttcctccatttgggccacgagttcggcaccgcgggtgtgatctttgtcctcgtccatcatctggcgcagctctgcttccatctcggcaaaggtttcccaccagttctctgtccgttcccggaagcactcccagaactgcggcagagaaataccctttttgcacgagtcaattagtacctccatgtcctgtcgggtgttgagcttaggatcatcaccgggatgcagttccagagctttttcaaaatgccgcagagcgcggccctcctgatccagataataataggcataccccatacggaaattccaggaataagtatctcccagttcctcctcatgggactgcatcagttccagtgcctggtgaagcagcttccttccctccggctcgctggagtccgccagattgttgtaggcgcgggccagctccatatccatttccggggtacgctcctcggcggggatggcctccagcgcatcaataatattatgttgtttgctctcctcatgccacttctggcactgcttcaaaatgtccatatcagggtcctcc

SEQ ID NO: 13569 - DNA, 28363 bp, Unknown
  gut microbiota DNA sequence
ggaccttccggtccgcgcgctcagcttattttcccgttacagcaggccgatccgccccagcggccacagcaccgccaccgcctgtcccaggatatagtcctcatcaatggcgcccagccactcatgccggctgtcggtggagccgttgcggttgtctcccatgacgaaaatggagtcctccggcacctcgaagtgggtctcctgcatgtggctggaggagggccacagcatctcctccagaatatagggctcgtccagcacctgtccgtccaccgccactgtgcccgcgtcgtagtcgatgtccaccgtctgtccctccagggcgatgacccgcttgacgatggcctccccctccaggaagtcggcagtggtcttgttcagcaccacgatgtccccctgctccggctcatagcccagggaccacaccgccagcagctctccgtccgccagggtgtcatccatggagtggcccaccacccgggtgatgcgccccaggaaggtgaacaccagtacgatgcacacgatggcagttaccagggtctggagccagtaaaacagctcctcctggggcagcttctcctgctcctccgccccctcctgaggggactgttggggcgctccggcccgggcctcaaattcttccgacattggcaagctcctcccgctccgacgggcggagcgcactgtgttgatcggtctcttattataccggctcccggctgggattgcaagggaaattcccgtcacagcagccggaggcggtccaggggccagatcaccgccaccgcccggcccagcaggcagtcccggtgcacgctgcccaccccgctgtgccggctgtcggtggagccgttgcggttgtcccccagcaggaacagggaatccgcctccacctggaaccgcgtcccctgcatctccggcttttggggcagggccatgggctccagaaggtagggctccgccagggcctgtctgtccaccagtacccggccctccccgtagtccagctccaccgtctgccccgccagagccacggcccgcttgacgacggcctccccctccaggggttccgccgtggtcttgctggcgatgacgatatccccggccctgggctcatagcccatggaccagaccagcagcagctccccgtgggccagggtgggggccatggagcggccgtccacccggaccacccggcccacaaaggtgaacagcagcacgatgcacacaacggccgtcatcagggtctggagccactcgaacagcccccttcccggctccttctccgccattgctcccctcatgcgcctcctcccctcagggcggtgcgggtcaccccgggcctgccctccaggtagttttcctcccgctcctggcaggtgaacagcaggatctgccgctcccggcccagctccgccagggcgtccagggccagagccatccgccggtcgtcaaaggtgaccagcgcgtcgtccagcaccaggggggcagggtcctccccgggcagacagagctggcacaccgccagccgcaccgccagatacagctggtccactgtccctcgggacagtgccagggaccgccggggcagcacgctgtcccgctccagggcggccgcctccagttcccgggtgagggagacggcagcgtactttcctcccgtcaggcgggccatccactcccccgcccgccggttcagctccggggagaagcgctcctggagctgggtgttggcccgcttcagggcgtccagggcgatgctgatggcctcatactccgtcttccgccgctccagctccccctggagctcctcccggcgggcggccagggcggcggggtcccccaccgcccgctgctcccccagggccatgctcctcagccgctccacccgctccagggcggcggtgacggccgccagctgctcctccgtctcctccggggggcgctccggccgcgtcaagccctccggcatggcctccagggcctgcccgccctgggccgccagctcgtcaaacagccttctggccccctccagcctggtccgggccagaccctgccgctcctccaggttcagggcccgggagagggcggcggagcagccaaacaggtcggacacctccggggcaaaggcgtggacaaaggagagcagatcgacccggctgttctcccgccgggctttccggtccgccagtgtctcccgcaccaccttcgcctgtcgggaggcctcctgggctgtctcgtcccggcggcggtagtcctccgccagggcggcgatctcctccccgctgcccgcgctataccgggccagcacctggtccgcctgggcggaggcccgccccgcccggcgcagggccaggactgcggccagggccagcgccccgcagcaggccacgccgcccaggatccagggcaggaagctgccgtccagtacggcgcccagggctgcggacaggaccagcagcgccaggcccacgctcagaaagaggggaaagcggcgcttctccctacgggcgcgctccagtgcctcccgccagagggccccgtcggcggccgcccggctgacggcctcctccccactcatcccgttgaagcggtcgtccagggcctcccggcgggcctgctcataggcctcctcggcctcccgcagcgccccctcaccctggcgtatctcctcctccagcaccttcaggtattgcagctctccctgggcccgcttcagctcctcccgctccggcagggcgccgtaccgggcctgctcccgttccaaagcgtcagcctgccgccgggcagcctccaaatcctgccgtgcctgggtgtaccggcggtccagctccagggcatccagcctgcggtgggtccgccgctccgcctccaggacagtcttcctgccctccagctccgccttttccccctccaggcgggacagggtccggttggcctcctccagccgggagagcaccgccccggtctcggccagctccccctccagtctggggatcaggcccacgctcttgttcacctttctccggttcagccactcacgcagctgcccctccgcctgggaaaaggacacgtcctcctccccggaggagaccagggcggcgatgcgccgctccagctccggcacggaggtgacggccagggagcccccctggcccacgaaagcggagcgttcaaagacctcctgccccacccccagcaggagctggccgcaggtgtcgccggtcatgccgggcaccggctcctcggtaccggtgtagacggcagagaatgccccaaaggggctgttcccctgacgcccccggcgcagggtgatgtcccgcccgtgccaggtgaggaccagctccccctccatgggggccccggaccagggctggtagcggttcttgtccgccagatagcccttccgatccctgtcccgggtatcgatgccgtagagcatggccttcaaaaaacccgcccaggtggattttcccccctcgttgggggcctggatcacattcagtccggggcccagctccagccgcgccccctccagccccccgaaggaggctgtcatgcgtttgatcttcacagtgccacgtcctccccatgctccaaagcggccagtccgaaccggaccgccagctgcaccgcctcattctccggctccgcctgacagcgcccctccatctcccggaggaacaggccggtgagggtgtcctcccccttccgctcccacagggcccgggccgcccgggtatggtcccgcagggtcaggccccagaacctgggggagagctcccgctccagctcccccagatccagcccctccaatccccgctccccggtgaggaggaggcggtagatgtcctcccccgtctgtgggggcagcgcggccagcacggcggcggcggggtccgcctgccccgtcaggtccacggacaggatctgatacctccggcggcacagggggacgaattccgcctctgtccgccccttctccacctccagccagagcacgcccttttctcccagctcgtcaaagccacgcccctcggggcagccggggtaagcccagaaagtctcccctgcccggcgcaggccgctgtactggtggacatggcccagggccaggtagtccagcccgctggcggcgatgtcctcctccgagatggggccgtagtccccctgggcggccacctccccgtggaggacggccagctggaccccctccgccggggcatgaaagccccgcaggggggaggcgctctgccggggggcgcagaaggccgctccccacaccgtacagcccagctccggcagccgcaccgcccccagctccgggccggtgaacaggtggacgttccccggccactccagcgcggcatagggggactggggaccgtaccagtcgtggttgcccggggccaggaatacggggcagggaatctctcccagggcccgggccagggcctggacggtctcccggaacaccaggtccccgtccagcaggtccccggagaggagcaccaggtcggcctcccgctcccgggccagatcggtcagccgggccagcagctcccgctgctcgccccgccgccgggcggccgcatcaggcttcaggccggaaaaggggctgtccagatggaagtcagccccgtggagcactttcagcatggttccattcctttcttggtcgttcaaaatgggccggtccgccggcatcactcccagaggtccgcccggcgcacctccacgcaccgcttcttctccgtgtcgatggtgaagcggcaggcctccagcttgcaggggccctccgcctcctcataccggcggggcagcccgcccaggaacaggttcatggagtgctccggccggatgcccagcaccgagcggtaggggcccgtcatgcccaggtcggtgacgaaccccgtccccttgggcagcagctggcagtccgcggtgggcacgtgggtgtgggtgccccacaccgcctgagcccggccatccagataccaggccatagcccccttctcactggtggcctccgcgtggaagtccaccagcaccacgtcgcagggggcgccgcggagcagccggtccgccgcctggaaggggctgtccaggttggagttgagctccagccgccccatcaggttcagcacgccgatgcgcacccccgccggtccccggaatacaccgaagccccggcccggcacccggccggcgtagttggccggccggaggatatgaccgtcgctgtccaggaagtccgcgatctgaaggcggttccaggtgtggttgcccagggtgatcacgtccgccccggcctccaggatgccccgggcctgccggggggttatgcccaccccggaggcgttctccccgttgaccacggtgaagtgaatgtcctcccgctcctggatctccctcaggcggcgggacaggatatcctgtcccccctcgcccaccacgtctcccaccgccaatatgtgaagcagcatgttcgtctcctccctggagcgcagctccgccgcccggcggcccgcctccctcccctttccggggcactgtttttcctattatacggcatgttgccccaaagcgcaaacatctgtttggccgcggcaccttttccggcctcccccctccgagcgccgcctttgcacacaaagcgcccccgccggacttttctgcccggcgggggcgctgtctcttatttagagctgccgtctcagatggacagcgccgcatccagggcgtctccggtggcccggacggcatttccaggggcgctggccgcctcgcccaccaccaggacctggggcacaaaagcggcgatacgctccctcagctcctcccggctgcgggtccccatggccagcaccacgctgtcatatccccgaagggagccctctgtcccgtcggccaggacataatccaccccgtcggggtagaaccgctccacccgggcgccggtgcgcaccagcacctgggattcccggaggtttttcaacagacagcggcggtgctccggccgcacatcggaggcaatgtcctctttcatctccaccaccgccacccggtggccccgctcgcccaggaactcggcggcctcacagccgatcatgccgccgcccaccaccaggaccccggcgcccaccactgccctgccctccagcatgtcctgggcggtgacgaagccgcagctgtccagtccggggatgggcgggatcagcggcccggagccggtggccaggatggcagcgtcgggggccagctgccgcagcagctcgggtgtggcccgggtgccggtccggatctccactccggcctgctggcagcggacgatcatggaccgcaccgctgcggagatctgcccctttccggtgggaaaggaggcgatgcgcagggtgccgcccagctgctccccctgctccagaagcaccgcctggtgcccccgccgggcgcaggcccaggcggcgtacagtcccccgggaccgccgcccactacggccacccgctttttctgccctgccgggccccactccagctcccggcccaccagcgggttgaccgcgcaggtgatgggcctgccggagagcatgttgggcacgcagcccagcagacagccgatgcagggggccagggtctccagctgcccgtccctggcccggttgggcagctccggatcggcaatgctctgccgcccgaaggcgatcaggtcggcccgcccctgccggaccagcagctcggcgtactggggctcggtgaagcggcccaccgcgatgacgggcaccgtcaccgcccgcttgatctcctccaccagcggggcgctgaagcccccgtggaactgtcccggcgcccacatgaactcgtcccgcaggtggaccgcccgggagacatggatggcatccacaccgcactcctgctccagataggcggccaccgcggcggcgtcctggacgctctgaccgccgtccagctcgtcgctggcgttgatgcggcagaggatgggcatgatcccgcccgtcttgcgccggatgttctccacgatcagccggggcaggcggagccggttctcgaagcagccgccgaactcgtcggtgcggtgattggtgcgctcagacaggaaggtgctcaccagatagccgtgggcacagtggacctccaccatgtccagccccgccagctgggcccggcgggcggcgtccccgtagcactcgatcaggcggtagacctcgtccctgggcatctcccgggggatctcccgcccgcaggcggcggggacagggctggccgccttcagggggtggccggtgagggcagaactgccctccggccccgcgtgctggagctggacggataccttagccccatagctgtggcaggcctccgccacccggcgaaagctgtcgatggtgtggtcggcaaagagacaggccttccgcggaccgcccttggcctgctcatagaccacagcggactcgatggtgatcagcccgaagccccccctggcccgggcggcgtagtaagccagggaccgctggctgaggcacccgtccgggtcggagaagttcttggccatggggggcaccacgaaccggttgggcaccgtcacgccgccgatctgaatgggcgaaaacatggtggggaatctcatcgttcagccctcctctgctgcggccgcctgacggcggctcaggatagagacaaagctcaccctgcggtccatccacccgccgatgagtccgatgcacttgcccatggtgaaggccgccagcaccgtgcccacacccagccccatgatccggcccaggccaaaaaaggtaaggaccgccgtcgtcagcaggcagatcacgtcaaaggagatcttgatccgggagtaggccgttccggtgatctccgccagctcccggggaaacaggtcggtggggataatgggcatcctgcagcggttggacagggcgatgccgaaacagatgaccaggtagctgatgcagaagtacaacacccgcagaggcagggtctggggcagccagctgatccagagctcgtggaagtcgatcatgatgccgaagaagaagcccaccacaaagctgaacaggtactccggcacgaaccgcttccgcaggaccatcaggctcagcaccagcagcccctggaagatataggtccaggtccccatggagacccggggaaaaagctcagaaaatgcatagggcacgctggaaatggcggagatccctgagcccgagcggagcatcagcaccacgccaaagctgttgatcaccaccgccagcaaaagggccagctccccccggagcaccgtctgtctctcttccatcattgtcatcctcccgcgccggagcgcatgtttttcttacctacaatgtagcgcagggcgggaaaataaacaaatcaattctttttatcaaaaaatagattttttctataaaatatggtacactggcccaaaggaggggtcctttgtgaatctgtcacatctgcgctactttgtggagctggcccacacccgccactacacccgggcggcggagcacctgttcatcactcagcccagcctgagccacgccatcggccagctggagtcggagctgggggtccccctcttcgagtgcagcggccgcaacaccactctcacccggctgggggaggagtttctggtgtgcgcggagcgcaccctctccaccttggactccggggtggagtccctgcggcgcagcgcccagggggaggggctgatccgcctggggctggtgcgccccctgggggtggacttcatacccgacctggccgcccgcttcctggcggagaatccagggaaagagatccacttcaccttcggcaccggggtcactcagcagctgctggacggccttctggcgcggcgctacgacctggtcttttcctctatgcctccggcggagctggggctgagtgcccggccggtggtccgtcaggacctggtgctggtggtgcccccggaccaccctctggccgggcggaagtccatcgatctggaggagaccctgtcctacccctacgtctccttctccaggggctccgggatgcgggacacggtggacgccctgttcggccagctccaggcccgcccccgcatctcctgcgagacggaggagatggaggtggtggccggtctggccgcccggggcttcggcatcgcggtggtcccccggatggacctgctggaccagctgcccctgaaagtcatctccatcgcccgccccgcctgggagaggagcatctacatggtcagcgacgagcggatctacctctctcctgtggtccgcaacttccagcggttcgtgctggagcagcagggcggggagacggagaccgtgcagaaatgctgatcgacagtctacacggccgcccccgccaaaacgaggccagccgcgctccctttctcctcatatcccggcggccagccggatcacgccgatggtcagcaggtgagccgggtaaaaggcgtaaaagaaccatttggggaccctgatccccgtccgggcggggaggaagatgaagggagccgccaacagggcaaaggcggtccagtccaccgcgtgccctgccgccagcagggcacgggggtcctccgggctcccgctccacagggcgggcagccagaacaggatatagagccccgcccccagccccggccgctcccggcacaggaagaagatcagcatcagcaggatgccgttgccggagtaatcaaaattgaagaggctgacgcacaggaatgctgcggcaaagagccaccaccgccgcgtctggaagccccacatggccagcagactgaggaacagagtgaagaagatgttccagttcatccactccgtctgccagtcccaggggtgggtggccaggatgtaacagggctgggagatgagagcaaagaggcccagccggcccagatatcgcttgatatcccgggtgtagagcagccccaccgtcatgcagtagcagaagatggggaaggccagccgccccacccagcgaaaggcggggtgctctggaaaaaacacggcccctatgtggtccagcagcatggacaggatggcgatcagcttcaaaaaatcggtgtccaggttggtgcgcagccgcggggccggctgacgccgcgctgtcctttggtccatttctcttcctccccccgctccggcgcccaatgccggagcgtcttttgtaggtccaggatagcacaggccgataaaaggcaggtcaaagagagatgaaagttttctgaaaatgggacaaaaatcagggcgcgcttccaaagaagcgcgccctgctcttatttcgcgtactcgatggctttggtctcccgcagcagatgcaccttgatctggccggggtactccagctcgtcctcgatcttcttggcaatgtcccgggccagcagcaccatctggtcctcgctgaccacctcgggcttgaccatgatgcggacctcccggcccgcctggatggcgaaggacttctccaccccggggaaggaggaggtgatctcttccagcatctccagacgcttgatgtagttctccagattctcccgccgggctccgggccgggccgcggagatggcgtcggccgcctggaccaggcaggcgacgatggtcttgggctccacatcattgtggtgggcgtggatggcgtggatgacgccctcgctctcccggtacttcttggccagctccacgccgatggtgacatgggagccctccacctcgtggtcgatggacttgcccaggtcgtggagcagtccggcccgcttggcctcggccacgttggcgccgatctcggcggccagcaggccggcgatgtgggagacctcgatggagtggttgagcacgttctgtccgtagctggtgcggtagtgcatccggcccagcagcttgaccagctcggggtgcagaccgtggacattggtctcaaagaccgcgcgctccccttcggccttgatggtggcgtccacctcccgcttggccttctccaccatctcctcgatgcgggcggggtggatgcggccgtccaggatcagcttctccagggccagccgggcaatctcccggcggacggggtcaaagcaggagacggtgatggcctccggcgtgtcgtcgatgatgaggtccaccccggtcagggtctccagggtgcggatgttgcggccctcgcggccgatgatgcggcccttcatttcgtcattgggcagagggaccacagacacggtggcctccgccacgtggtcggcggcgcagcgctggatggccagggagatgatctcccgggccttagtgtccgcctcgtccttgaagcgggcctcgatctccttgatcttcatggcagactcgtgggtcacatcggcctccagctgatccagcagatacttcttggcctcctcggcggtgaagccggagatccgctccaggacctccatctggctctgcttgatctcctccgcctcggcctgggtggcttccagcttggccaaacggttggagagatgctcctccttgcgctccatgttctcggtcttgcggtccaggttctcttccttctgctgcagccggcgctcctgcttctgcaggtcggcccggcgttccttctcctcccgctcgtactcgttgcgggccttcaggatctcctccttcgcctctaccagcgcctcgcgcttcttgctctcggcactcttgtacgcctcgttgacgatgcgcttggcctcctcttccgcggagccgatctcccgttccgccgtcgccctgcgccgctggtatccgaacaggccgcccagcacaaaggccagcacagccacgacgcccccgatcatatagggtaacattgggtttttacacctccataaatttcagatcttggaacctgcgttccctgcggcggaccgccgcggctgccttttcggcataaaatgagccgcaaggcgcgccgtgccgcacagcggcggagcatccttgcgacaactgaaaaacttcccccatgtttttcatttgtgtcctgttcatattgtaaaggcaactgcggtctctgtcaagatttattcacatttaccacaaatttattgtcagacatttttactcttttcataatgtgctcccatatttcgacaaattttttatttattttgccagcatttctctcatattttttgcttgggggattttccgctccgcccggagggcagaaaaaggcccggcacgccggatgggcgcgccgggccttcccctcagacctgctggggaagggagtcatcctcccggacccagtcctccacatggactacggagtactcccgctcggtgtttcggatgaccacccggtctatgcccgcgttgatgatgaggcgccggcacatggagcaggaggtggcgtcatggagcagctcgccgctcttggcctcccgtccggccagatagagggtggcccccagggtgtcccgccgtgcggcggagatgatggcgttcatctccgcatggaccgagcggcacagttcataccgctctccgctgggcacattcatggcctcccgagtgcagtagcccagatccatgcagtttttccgccccctgggcgcgccgttgtacccggtggaaacgatctcgtcgttcttgacgatgatggctccgtagcaccgccgcaggcaggtggagcgctccagcaccgtctccgcgatgtccagatagtagttctccttgtcgatccgcttcatggccgccctccttttttcgacagtatagcccaatttgtccgtccgcgcaagacagtttacattttgtttacgattggttccttgaccgccgccatttcccgcggtatcatatcaacatgccaaattggcggttcccgctttccagaggaggctctttcatgatccggaatgccattcagcgctttatgtacggccggtacggcggcgaccagctcaatgttttcctgctggtcctgtatctgatcttttattttatttctatctggaccaattttctccccctgtactggctgtctctcgttgtgatcgtctggggactttttcgaatgttgtcccgcaatctcccccgccggcgggcggagaacgccaagtttatgcagctggccggaccggccatcaactggttccacctccgccgcaccatgcaccgggacaaggagcaccgctatttccgctgccccagctgcggtcagcagctccgggtacccaagggcaagggaaagatcaccgtcacctgccgcagctgcggcgccgtcttccaggaaaaaagctgaagatacacgtaccgcccaggccctttcccggcctgggcggtctttttctctaaagctgtttcttccgcaggagccggatgtcctccccaaagaagtggagcaggtggtactccccctccagccgggaggcgatctggggggagtagcggacagcagcctcctccatagacaggttagaggagatgacggtgcgctttccccccaccagccgcccgttgatcagctcgtagagggcggactgggtgaactgggtggtcagctcgctgcccaggtcgtccaggatcagcaggtcacagcccagatagcgccgggtctcgtcccgggcctcccggccgtcgtcgctgtcccggaggaacttccgggcctcgaactgcgcgaacacgttccccgctgtgtcatacaccaccgaatgtccgttctccgacacagtgcgggcgatgcaggcagataggaaggtcttgcccagcccgggggccccgctgaggaagaggtttttgaagtagaagcggccgaacttctgggcatagttgagacacacctcgtacaccagctccatgttctcccggggggaggtgccccattcgggccagaagctggtgctgtaatagtccatccggaaggtgtcgaaggactgctcccccaggtccagcagcttggacagctcccggatctgctcctgggcgcacagcgcccgcaggcagcggcacatctcagtgcccctccagcccgtgtccccgcacagggggcaggcgggcttgtcatccagggcgtcctccgccagatccatgcgggccagcagctccgcccgctcctgctggagggccaggttcttccgccgcacctcctccaccgtgggagcgcccccctccccccggcgcagggaggcggcaaacagctcggtcatggtgccccgcagctgccggtcgatctccgacagccggggctggcgctgacaagcggcccgccgcagggcctgctgctgctcctcccgggcgcggcgctccccctccagccgggcggtggcccggcgcaggaccgcagggtcatatgacatctcttattcctcctcccgcttcatctgctccatcaggcggcgcatccgctccatgtcctcccgcacccggcgctcctctccgggctggggagtccgcccctgggccggcgccccgccccggttccggcgcaggccgtccccggcctggatggccgccacggtgtgcagccccttctcgtgccagcggcgcaggatgccgttcatatagccccagtccatggactgctttttcatcaccgtcttctcataggccagtcgcagggcctcgttgtcaaagcccatatcctgccaggcggcgatataggtcctctcccgctccaccagggggcgggccgggatgtccagcagccgcagcacctcccgttcccgggtgcgcagctgagccagctttttcaggtgggcctccgccgcctccacggtgtcgatgccctgcctggaccaggcaaagccctccttgcgcacctgggagaggaaggggcgccgccccggcccgtacttccgctccgtctcctcgatgcaccaggtgaccagcatcaggatcacctcgccgggcagggccaggtggtcatacagggtgagcaggatcttcaggtcattggcagacagccgcttgcccaggcggcgctccacctcgtccgccagggcggagaaggtggagcccgcctcctggagggcggcagtgacgtcctgggtggtgtattcggggggcagcgcctcctgaacagggggtgccaggggcggcggagcggcctccgcccccgccattccctgggcggagagcaggtccagcgccccctggagccgctcccggggccagttcaggccggcggcgttcccgtggcccagcaggtagagatacagcagggcggcgtctccgctgtccagccggatcagccgctcggccgccgccgccggcatggacaggatgctgcccggcatcaggggtccggtcatcccatgcccctcccttccacaaaagtctgcgaccattttactctaaaatcgccccggcgtaaacctccaaaatcccaagggcaaaaaaataaaaaattcatggtaaatttgtttttcaagcggcctgttctgtggtataatgattgccatcttgaaacagcagagaccgggaggggcttcacgatgaaaaacaagatcaccgtctccatcgcgggacaggaatacaccatggtggccgccgagggcgaggactatgtccgccgggtggccgcccatgtggacagccagatgcgggaggtcctctcccagggccgtctctcccaggcggacggcgccgttctggccgccatgaacatcgcggatcagtatttcaaggagcaggaggccgccgaaaacctgcgccgccagatcaaggagtatctggaggaggccaccaagctgaaaatggagctctccgaggccaagcgggagatcttcaagctccagaaccacaaataagcgcaggagaggggttccccgccggggacgggggcccctcttccctgcggacgcgccgcctgagggcggatctttacgggaggtgccttatgctggagcttctcgcccctgccgggtccatggaggcggtcaccgccgccgtgcagaacggggcagacgccgtctatctgggatatggggatttcaacgcccgccgcaacgcgaagaacttcaccggggatgaagctgcggcggcggtttcttattgccatctgcggggcgtcaaggtgttcctcaccctgaacaccctgctcaccgaccgggagctggccggcgccgctcaggaggccgcccaggccagcgccatgggggtggacgcggtactggtccaggatctgggggtgctgcggatgcttcggcagacggtgcccgacctgccggtccatgcctccacccagatgacagtccacagcctggacggggtgaagcagtgcgccgacctggggatgagccgggtggtcctctcccgggagctgtcccgggaccagatcgagtacatctgcgcccgctctccggtggagatcgaggtgttcgcccacggggccctgtgcatgtgctactccggccagtgcttcttctcctccgtcatcgggggacgcagcggcaaccgggggctgtgtgcccagccctgccggctgaagtacggctgggggaacaaggcagacggcagccccctgtccctgaaggacatgtccctggcaggccacctccgggaactgaggaagatgggggtggcctgtgttaagatcgaggggcggatgaagcgccccgagtatgtggccgtggtcactggcatctatgcccgggccatccgggaggggcgggagcccacggccgaggagctggagcagctgcgctccgccttctcccgggacggcttcacggacggctactttctggggcagacggggccggagatgttcggcacccgccaggacgaggcggagccccgggagctgttcacccaggcccgggccacctatgagagcggggagaaccggaaggagccggtgcggatgtacgccatgctccgccggggggagcccgcccaggtggccgtccaggacgctcaggagcatctggcctccgtcaccggcccggtgccggaggaggcggtgaacgtccccctgacccgtgagaaggtggagggacagctctcccgcaccggagggactcccttctcctgtgagaaggtcaccgtccacgtggatgaagggctctccctccccctgtcggccctcaacgccctgcgccggcaggctctggaggagctgggccggcagcgcaccgcactgccggagcgccgctgcgagcccttccgccccggggtgcgctatgagaaccggaagcagccccctgtctacaccctctctgtgcgcgccgccgaacaggtcagcccggagctgctccgcctcgcccccgccctcctctacctccccgccggggagggggcggcccacccggaggtggtggagcaggcccagaaggccggggtgcgggtggccgccctgctgccccgcatctgcaccgatcgggaggcacccgccctcttccaggagctggaacggctgcgggcgatgggggtgaccgacgccctggccggcaccctggacagtgcccgccgggcggcggagctgggcttcaccctgcggggggactacggtctgggggtattcaacggccagacgctgaaggagcttaagcgcctgggcttccgctccgccactctctcctttgagctgaagctggcccagatccgggacctgtccaaggggctggacaccgagctggtggtctacggccgcctgcccctgatgatcaccgagaactgcatcatccacaaccacagcggccggcacacctgtgccaacgtgaacctccttaccgaccggaagggggagcgcttccctgtggtgaaagccccgggctgccgcaatgagatcctcaattccaagaagctgttcctggcggacaaggccggagactggcagcgcctgggtctctgggcagggcgtctgatgttcaccaccgagaacgcccgggagtgcgtccaggtgctggagcgctacctgggccggggcagctatcagcccaacgactacacccggggcctgtattaccggggggtagaataaagcgcggaacgcggagaggaggtcccccctatgttcagccggcagcgcctgttctggcaccgcgggccctatgacctgcccagcacagaccagctctttctccaggcgacggcggactgctgcgccttccacatggcccgctgcccccagtaccgggccattgcggagcacctgggcttctccccggaccagctgcgcaccatggacgacctggtccgggtgcccatgctgcccaccctgttcttcaagcgccacgccctcttctccatgccccggcggcggatggtgatgaaggtcacctcctcggggaccagcggcaccttcagccaggtgggcttcgacctgggctgcatctgggcggaggtccccatggtcctccggctgggctggcggcaccggctcatctctttccgccccgccaactatgtggtgctgggttacaagccagaccggcgcagctctgccggcgttacccgcaccatgttcggcatgaccttcttcgccccgcccctccgccgcttttatgccctccgctggcagggggagggctacgtccctgacctggacggtgcggtggaggccctggagcggttctcccgctctcccttccccacccggatcgtgggcttcccctcctatctctggttcggactgaagcggatggaagagctgggcatctctctgcgcctgcggcccggttccaagatcctgctggccgggggctggaagcagcactggcagcagcaggtggacaagtcagtgctctactccctggtccggcgggtgctgggggtgggggaggaggacatccatgagctgttcggcgccgtagagcaccccatcttctataacacctgccccaggcaccacttccatgtgcccatctactcccgggtcctgatccgtgacccggccaccctggagcccctgcccatgggacaggtggggctggtcaacctcatctcccccctcatccgggccactccggtcaccagcgtggtcactgacgacctgggctatctcaccccgggggatgcctgcgggtgcggcctgacctccccctacctgaccctgctgggccgggtgggcctgggggacatcaagacctgcgccgccggcgcggcggacctgctgggaaagggggaggggttttgatcttcgccaacggacgcctgctcccggacagccagctgtcccaggtgctggaggagctggaggaggcggtcaatgagacccgcgcctgccggaccctggagccggagaccgtcatctccgccctccaggctgtgggggagcggctggaccggggagagctggacccgctcatcctccggtacgccggtcccggcgggcgccgggaggtggcgcacatccgccccctgctccggcgggaggccctggaatacaagctggccgtggagctgggcatcccgctctactcctttcaggagcggcccttcggccgcacccagaccgttcctctgggcaccctgttccatgtcaccgccggcaatgtagacggcctgcccgccttcagcgcagtggagggcctgctcaccggcaatatcaatctggtgaagctgccctccggggaccaggggctctccctggccgtctttcagctgctgacggagcaggagccccgtctggcccccttcctctacgccttccagatcccatcccgggacaccgccgccctgcgacggctggcagatctggcagacggggcggtggtgtggggcggcgacggggcggtgactgccctgcggcagctggccccgcccggctgcaagctgatggagtggggccaccgcctcagctttgcctatctgtcccggtgggagggagaggaggacgctctctccgctctggcggagcacctcatccagaccgggggactgctctgctcctcctgccaggtcatctttctggacacggacgccctcggggagggggatgccttctgccggagctttgtccccctgctggagcgggcagcggaccgcttccgtgctgcccttggggagaagggggaggggagcctgtacgcttgggagacccggctggagcacgccgccgaccggctgcccggcaccctgtttcccggccggggctgctccctcaccctgcgggaggaccgggagctggagctctcccccctccacggcaatgtgctggtgaagtgtctgccccagaaggctctgctccctgtcctgaggcggcagaagggccgtctccagaccgcggggttgctctgtccggcccaggaccggcccgccctcacccagctcctcgcccgggccggagtgacccggatcgccccgccgggcagcatgtcccgcactctctccggggagggacacgacggggaattccccctgcggcggtacgtccggacggtggacatccaggagccgtccccggaccgccccatctgactgttgatactaactgaccgcaaaggagccgatcattatggaactgaacgtcaaagccctctcccccaagatcgggacagagatccccgcccccttctacgccagcgccggcgccgccgccatggatctgcatgcctgtgtggaccaggcggtgaccatccccgccggcgggcgggcggtgatccccactggcatcgccatcgccctcccctccgccggctatgtggccctggtcttcgcccgcagcggcctgggcatcaaacacggcatcgcccctgccaactgcgtgggcgtcatcgacagcgactaccggggagagatcctggtgggactccagaactccggggacgcagactacgtcatccagcccgctgaccgcatcgcccagctgatggtggtcccggtggtccaggcccaggtgaagatggtggaccagctggatgagacccagcggggcgccggtggcttcggctccaccgggaaatagagatccgctgagagaggagggtttgggccatgttcggatttttcaaaaaaaagggcggggagatccccgaggaacagcagcggcagcagaggggggctcaggaggggcagacgcggcaggacgccgcggaggtcccccaggagttccgcgccctgggccaggactttctgccggaggagctgaacatcctggccgtcaccggggccagcggcttcggcggcgggcgcagccagggggagaagctgtggaccgcctccatcggcctgaccgcctggatggaggaggacagccctgacatccaccagggtgacttccgcctggtagccctggccgacgaccgtctgatggactatctgcgccagcgggtgccccgggacttcattatcaagtgccgggcccggctctctgtggacggcagccgcctgctgatgctggagctgccccagcccggcttcgaccccgacctgaaggccatcctggatgagcagaaaaagcctgtgagcacctgggtggaggggctgggcaccttcaccctgaaccgcactgtggactggttcgaggccaccgtggactggctgggcagcgagatcgccctggacttcgaccggggcgtgccggaggagatggcctccgcccaggaggccggacgggccctgatggccagtcaggcggactgggaccaccgggtgcgctcctatgccgcccaagagctgctctccctggccaacgactgggcggcggacgcccgggaggaggaggacgaggacagcggcgcgccgctggtcacccaggagcagttcatggagcgcatggagctggagtccatccagctgctgccccagggcgggttcgagttctggttcaacgacggggatctgttctggggccactccatccacgtcaccggctccctggagtcagggccggagagcgcccagatggagggctgagtccccgcgctccaattcatggaatttcgaggtgttctcatgtccattatcctggcttcccaatccccccggcggcgggagctgctggcccagatgggggtcccacaatttgaagtcgtccccgccctgggggaggagatcgcttccccgggcctgtcccccgcccagctggtggaggtcctctcacgccagaaagcggaggaggtggctgtccaggccgggccggacgatgtggtcattgccgccgacacggtggtggcggtggacggtgccgtgctgggcaagccccgggacccagcggatgccgcccggatgctctccctgctctccggccgggcccacacagtctacaccggggttacggtccggcgggggaccttcagccgcaccgcccacgaggctacccaggtccgcttccgcccgctgacccagtctgagatctcggcctatatcgccactggcgagcccatggacaaggccggggcctacggcatccagggccggggctgtgtgctggtggaggggatcgacgggaattaccacaatgtggttggcctgcccacctgcctgctggccggcatgctgcgccaggtggggatcgatgtgctcaccggaggacaggaggggcgtccatgaaacattttctgcggcagaatggcctgctgctcctgatcatcgccctgctgctgtcggtgctgatcggcatcgtgtccgccgtgatggggggcaacgccgaccctctctccaacgcggtgggcttcatcaccacccccatccgcaatggggtgagcgccgtgctggactgggccgacggcgtgcgtgcctatgtctttcattatgaggagatggagcagcagatccaggacctggagcgccaggtcgctgagctggaggagcaggcccgggagggccaggaggccagccgggagaacgagcagctgagggagctgctggatctgcaggccaagcggagggacttcgtctttgagtccgccaaggtcaccgcccgctcctccaccaactgggactccactctcaccatcggcaaggggagcagcgcaggtctggaggtcaatgactgcgtgatcaccgagacaggcaccctggtgggggtggtctctgaggtgggtctgaactggtccaaggtctccaccctgatcaataccgacatcgagatcggcggccaggtcacccgcacttacagtgccgggatcctggagggagacttcaccctgatgagccagggcaagctgaagctgagctatctgcccgacggtgcccagctggtagcaggggacgaggtggtgacctccggcaagggggacgtgttcccctccggcctggtggtgggcaccgtggaggccgtcttcaccgacccctccggcatgaaccgctacgcggtggtggagcccgatgtggacctggacagcctggtggaagtctttgtcatcaagagctttgacatcgtggagtgacgctgccgcgtttcctgccgtctctctcccgatcttttccgaaaagggggcgcccctgtgacccgacgagaccaaatctataagtggtgtatctacgccctggggctcttccccatctgggtgctggacgcctttgtcctcagccgctatcccctgctggggatcactcccacccttctgcctctggcggtctccgccgtggcggtgctggagggggcccttcccggctccggctttggactggcggtggggctgctctggacgctggcctacccgggcagcagcagcctgctggtcttcggcatggcgctggccggcttcctggtgggcatcgtctcccagtatgccctgaaccagaacttcctgggttgcctgatctgctccgcggctgtcctggccgtgcaggaggtcgtccgcctgctggccggcctgttcacccagatcgcccccatccagtcgctgctccaggtggcggtgccggagttcctctggtctctgtgctggatgcccttggtctatctcatcttccgatccatcttccgccgggtggggggcacccgcctggcgtgacctgtccgctctgaaagggggcgtgcgccatggagaaaaaacaatttcaccgtcgggggctggggatgctcctcctgctggccgtcattctgttcgggctgggctcctccctctatgacgcccagatgatccacggggcggagtatctggcccgctcccagaacagcattgcggagacccagaccgtggaggccgcccggggggacatcctggaccggtacggccgggtgctggtctccaaccgggtcacctatcaggtcgccctgaacaccgacgccatggagaaaaaccgcaacgacatcctcctggccctgatccgcattgcccgggatgccggcgtggagtgggaggacaccctccccattaccgcccagccccccttccgctacaccacggacacccccttccagtatcccaccaccgatgaagagggcagccccaccaccagcctcacccgcctggggcggctggccgtaaagatgaagtggatcgatgaccccaccgccgacggggcccagggcgccccccttcccaccgccgaggaactgctggaaaaaatgcgggagagctttcagctggagttggagggcgcggatatgcgcgccgtggccggagtactgtacgagctgtactaccgctccatggtgaacagctggcctccctatgtctttgcggagggcgtagacatcgacttcatctctaaggtgaaggagcagggcctctccggcgtggagatcgaggccgccaccgtccgcacctacaacaccgaatatgctgcccatctgctgggccgggtgggggccattgagaactgggatgcatataaggacctggatctggacggggacggcacgccggactatgagatggacgacactgtcggcaaggagggggccgagctggctttcgagtcctacctgcggggcaccgccggggtccgggaggtggagcggaacaccagcggcaaggtggtgtccgagaagtggaccaccgccccccagccgggggacaacgtggtgctcaccatcgacatcgaccttcagaagcaggtggaggacatcctctcccaggctatcccccagctggccagtgaggacacagagggcgcagcctgcgtggtgatggacgtgaaccgggcagaggtgctggcctccgcctcctacccctcctatcacctggccacctactctgccgatttggcggagaacagcgctgatcccctcaagcccttcctgaaccgtgctttccagggtgtctatgcccccggctccacctttaagatggtcaccgctgtcgccggactggagagcgggatcattgagccggataccgagatcatggacactggcgtctacacgtattatcaggacgacggcccccagtgctggtattggcgccagtaccggcgcaagcacggcctggtgaatgtgtccgaggcgttggaggtctcctgcaacgtattcttcttcgatgtgggccgccgggtgggcattcaggggctccaggagtttgccgccaaattcggcctcggggagcccaccggcatcgagctgtatgaggagaccggcgtcatggccggaccggagtacactcagtccatggggcagacctggtacgagggcagcaccctgtcggtggccatcggccaggagagcagccagttcacccccctccagctggccaactacatcgccaccctggtcaacgggggcacccggtactctgcccatctcctcaaggaggtcaaatccagcgacttctcccaggtgctttacacctacgaaccggaggtgctggactccatcgacatccagccggagaatctggatgcggtgaaagcggggatgctggccctgaccaccgggaagggctctctggcccgctatttccaggaccttcctgtccaggtgggcgccaagaccggctccgcccaggtgaacgccgagacggaatccaacgctgttttcgtctgcttcgccccctatgacgatccgcagatcgccatctccctggtggtggagaagggcggcagcggctccactctggccagcatcgcggcggacatcctgcgctactacttctccgccgaggagtcccgggaagagaccttgacggagaacacccttatccggtaaaataggggccgctgatcctatcggagtagagccctcttcttcccacacgccccgcttccacggggccgtggatcttcccaaggaggtttccttttatgactgaccgatctttgatccgcaacttttccatcatcgcccacatcgaccacggaaaatccacgctgtctgaccggctcattgagctgtgtgacgccgtcccccagcgggagatggagtcccagctgctggacaacatggatctggagcgggagcggggcatcaccatcaaggcccgggccgtccgcctggactacaaggcggaggacggcaggacctatgccctgaacctgatcgacaccccgggccacgtggacttcaactatgaggtgtcccggtccctggccgcctgcgagggcgcggtgctggtggtggactctacccagggtgtggaggcccagaccctggctaacacctatctggccctggagcacgacctggagatcctgcccgtgttcaacaagatcgacctccccgccgccgacccccagaaggccaagcacgaggtggaggacatcatcggcctgcccgccctggacgcgccggagatctccgccaagcaggggatcaacatccccgctgtgctggaggacatcgtgcagaacgtccccgcccccgccggcgacccggacgcccctctgaaagccctgatctttgacagccagtatgacccctatctgggcgtcatcgtctatttccgggtgatggagggcacgctgaaaaagggcatgggggtcaaaatgatggcctccggtgccagctatcaggtgctggactgcgggtatctccgccccctgggcatggactcctgccagcagctcaccgccggtgaggtgggctggttcaccgcctctatcaagaacgtaaaggacactcaggtgggtgacaccatcaccggcgccgactgtccctctgcagcccccctccccggctatcggccggcccagcccatggtcttctgcggcatctacaccgaggacggctccaaatatcctgatctgcgggacgccttggataagctccagctcaacgacgcctccctgtccttcgaacccgagtcctccattgccctgggctttgggttccgctgcggctttttgggcatgctccacatggagatcatccaggagcggctggagcgggaattcgacctggacttggtcaccaccctcccctccgtgatctacgaggtcaccaagacggacggcaccgtggtgcgggtggacaacccccacaactaccccgatcccggcgccatcctggaggcccgggagccctatgctaaggtctccatcatctctccccccgactatgtgggcaacatcatgcccatgtgtcaggaccgccggggcgtgtttaaggacatgcagtatctggacaccaacctggtggagctgcactactccatgcccatcggcgagatcatctacgacttctttgacgccctgaaggcccgcaccaagggctatgcctccctggactacgagctggagggctatgagcccagcgaactggtcaaggtggacctgctgctcaatggagaccaggtggacgccctcagcttcatcgcccacagggacaaggcctatgcccgggcccgacgcatctgcgagaagctgaaggaaaacatcccccgccagctctttgaggtcccggtccaggcggccatcggcggcaagatcatcgcccgggagaccgtcaaggccatgcggaaggacgtgctggccaagtgctacggcggcgacatcacccgcaagaagaagctgctggagaagcaaaaggaaggcaaaaagaaaatgcgtaccttgggcacagtccaactgcccactgaagctttcatggcagtcctcaagctggacgaggagtgagacacctatgaaaagatcccatttcggcgttatgctgtttctgacaggcagcctcggataccttatcttcagcttgtatctgtcccaaaatcaatatacctataacggcatgacgggcacccttgcagcgctgcttggcaacgagctgctgatcccctacctcgttttttgcgctatgggggtcattggatttgtcatctgcctgtacgaggcctttatccgtaaaccttaaggatatccctccctgccaaaagcaccttccctcccgcgctgtcccatacgccggaggaaggtgcttttttctctccagcctggtgttccagtgtcaggataaaaaacttctatcaagaccattgaaatgaagtattggacgggagaggaagaagtggtataatggcgacagtaaggaaagctggacg

SEQ ID NO: 13570 - DNA, 959 bp, Unknown
  gut microbiota DNA sequence
aggcagccaccaggtagccccacggaacagggaccacacccgctcctcgtctgccgcaaggcgggcgaccagaggatgctccccgaagttccagtccttctccacagtggggggcatcggctcatcgtatgtatggcaggcggccaccagcagcatagcgccgaaggcatcccaatccggcttgtcggtgtaatagggtttctcattatcttcaggccagggggcgtaggggggctggcccggctgagaaatggcgctcaagatctgatcccgccagttctccaccgccgcctggacctcagccggggacatttcttcctcgttatcagcaggttccccgtccggggtgatgcggttgaaagagtatccgttttcctccgcccactgctgcacaacagttttccagttgtgagaatagtaccgggtcagcgtcccggcgtagatgtcaagtcccatagtaatgtctccttttctgttatgcagtcattcttttgctggagcgaacatctggtcaatcttctccagatcgtattccaaaatccagtcatgaaattgatgatagagaggcaatagcagcttctgtgagccgcccagcacatccagcccacggtcatcgtacaaatggtagaggaacggccccggcccagccagatagacgctggacacaaagccgttccagccgccgatgtcccccagaatgatttcccgaagaagcagctctggttgaaagctgatcttgctgagatcccagtaaaactgcacttgtgcatgggtatccccatcttcatcctgctctgtggccgaaagttgttcatcgggaactgggaggcccactcgctgccggataacggtcagcagggactcggcgggttcttcatcgggatacccgtcgatccgcagaaggtccggcaccgccggaagtgcccgatagatcgcggcggctcggtccagcgccccct

SEQ ID NO: 13571 - DNA, 647 bp, Unknown
  gut microbiota DNA sequence
ggagggctttgagggctgcctgtcggtgcccggccgctggggcgtggtcaagcgcccctacaaggtgcgtgtgcgcgcccaggaccgcaacggcaatttctttgaagcggagggagagaagatcgtcgcccgctgcttctgccacgagattgaacacctggacggccatctgttcaccgagcataccgaccggctctacaccacagaggagctggaccgcatgatggaggagcagggcgaatgagaattctgtttatgggcacccccgattttgctgtgccctccctggaatcgctcgttgccgccgggcacacggtctgcggggtattcacccagcccgacaagcccaggaaccgtggcatgaagctccaggcaccgccggtcaaggtgtgcgctttggcccacaatatcccagtctatcagcccgtcaagctgcgggacggcgcggctctggcgctgattcaggagctggctcccgagctgattgtggtggccgcctacggccgcattctgccggacgagatcctggccgcacccccaaaggggtgcatcaacgtccactcgtccctgctgcccaactaccggggggcggcccccatccactgggcggtgctcaacggggatcgcgagaccggcgtgaccatcat

SEQ ID NO: 13572 - DNA, 980 bp, Unknown
  gut microbiota DNA sequence
ccatttccggggtacgctcctcggcggggatggcctccagcgcatcaataattttatgttgtttgctctcctcatgccacttctggcactgcttcaaaatgtccatatcagggtcctcctcgtcctcatccggtttccagtctttgatctgctggaacacaccgttctcatcccgctcaaaggcgcagggggcgggtgtgttcagcagcgggataatgtcgggatcgtcgttgcaaattgtgttcagcttgtaaatcccggcgttgttggggtcgtccatgtacgcctcgctctcgtcaccagcggtgaagcgccagccactgtcccagccgccgtccggcttctccctgtagcagtagcccaccttgcggccctctactgtgatgcggttggtggcgatgcagccatcggcacccttccagtcagagagtagaggtttcacatccgccgctttcacatggtagtcccggttgcggccagcggcctcgtacagttccttccgcagcgcctccacatcccgagccatttcgtggatctcctcgtcgtccatcatctcactgaggtcatattccatcgggttctgggcaaaatccgcgagggccttgttcatggcgtcgtgctcctctggcgtggcggtgatgcggatgcggcgggaggaggtgttgtactcatccagatcctgaaggtttacactgccactgacgctgcactccagcaggatagcggccagatcggtgaccacatcaatggcgaagtggaagtccatctccacgccatcggagtgtgtaaactccagatactccacggtttggcggaagtcccagctctgcttgtccagaccgatcttggcgaaaatctcgctgagggggatttcctcctttttctgatcctctaaaaatgccacaaggttcagactgtcatcggaaccgccaataaagttgccccagtattttttgatatacatttgtcgtgcctcctgt

SEQ ID NO: 13573 - DNA, 339 bp, Unknown
  gut microbiota DNA sequence
ggaatggggtgtattgcagacatccagacccaggcggctttcaaaacatactgggccaagcggctggaggaggacccggacatcgacccctacaacgacctgttctgcgacttactggaggaaaacgcccaagcccaccccaaatatcagggggactgcggcgactggctcaactggaccgtgccggacacggactgcaacctgcccatcttctcctctggctggggtgacggttactatcccgtctacttcggctatgacgcaaagggcaaagtctgcgccgtgtatgtgcgcttcatcgacattgaagccagttatcgagagcaggattaaaaatgt
